United States Patent Application Publication US 2014/0065620 A1 - sequence listing, part 2

SEQ ID NO: 772 - DNA, 9051 bp, Homo sapiens
  misc_feature (33)..(33): second gene starts at postion 33
atgttcagctttgtggacctccggctcctgctcctcttagcggccaccgccctcctgacgcacggccaagaggaaggccaagtcgagggccaagacgaagacatcccaccaatcacctgcgtacagaacggcctcaggtaccatgaccgagacgtgtggaaacccgagccctgccggatctgcgtctgcgacaacggcaaggtgttgtgcgatgacgtgatctgtgacgagaccaagaactgccccggcgccgaagtccccgagggcgagtgctgtcccgtctgccccgacggctcagagtcacccaccgaccaagaaaccaccggcgtcgagggacccaagggagacactggcccccgaggcccaaggggacccgcaggcccccctggccgagatggcatccctggacagcctggacttcccggaccccccggaccccccggacctcccggaccccctggcctcggaggaaactttgctccccagctgtcttatggctatgatgagaaatcaaccggaggaatttccgtgcctggccccatgggtccctctggtcctcgtggtctccctggcccccctggtgcacctggtccccaaggcttccaaggtccccctggtgagcctggcgagcctggagcttcaggtcccatgggtccccgaggtcccccaggtccccctggaaagaatggagatgatggggaagctggaaaacctggtcgtcctggtgagcgtgggcctcctgggcctcagggtgctcgaggattgcccggaacagctggcctccctggaatgaagggacacagaggtttcagtggtttggatggtgccaagggagatgctggtcctgctggtcctaagggtgagcctggcagccctggtgaaaatggagctcctggtcagatgggcccccgtggcctgcctggtgagagaggtcgccctggagcccctggccctgctggtgctcgtggaaatgatggtgctactggtgctgccgggccccctggtcccaccggccccgctggtcctcctggcttccctggtgctgttggtgctaagggtgaagctggtccccaagggccccgaggctctgaaggtccccagggtgtgcgtggtgagcctggcccccctggccctgctggtgctgctggccctgctggaaaccctggtgctgatggacagcctggtgctaaaggtgccaatggtgctcctggtattgctggtgctcctggcttccctggtgcccgaggcccctctggaccccagggccccggcggccctcctggtcccaagggtaacagcggtgaacctggtgctcctggcagcaaaggagacactggtgctaagggagagcctggccctgttggtgttcaaggaccccctggccctgctggagaggaaggaaagcgaggagctcgaggtgaacccggacccactggcctgcccggaccccctggcgagcgtggtggacctggtagccgtggtttccctggcgcagatggtgttgctggtcccaagggtcccgctggtgaacgtggttctcctggccctgctggccccaaaggatctcctggtgaagctggtcgtcccggtgaagctggtctgcctggtgccaagggtctgactggaagccctggcagccctggtcctgatggcaaaactggcccccctggtcccgccggtcaagatggtcgccccggacccccaggcccacctggtgcccgtggtcaggctggtgtgatgggattccctggacctaaaggtgctgctggagagcccggcaaggctggagagcgaggtgttcccggaccccctggcgctgtcggtcctgctggcaaagatggagaggctggagctcagggaccccctggccctgctggtcccgctggcgagagaggtgaacaaggccctgctggctcccccggattccagggtctccctggtcctgctggtcctccaggtgaagcaggcaaacctggtgaacagggtgttcctggagaccttggcgcccctggcccctctggagcaagaggcgagagaggtttccctggcgagcgtggtgtgcaaggtccccctggtcctgctggtccccgaggggccaacggtgctcccggcaacgatggtgctaagggtgatgctggtgcccctggagctcccggtagccagggcgcccctggccttcagggaatgcctggtgaacgtggtgcagctggtcttccagggcctaagggtgacagaggtgatgctggtcccaaaggtgctgatggctctcctggcaaagatggcgtccgtggtctgactggccccattggtcctcctggccctgctggtgcccctggtgacaagggtgaaagtggtcccagcggccctgctggtcccactggagctcgtggtgcccccggagaccgtggtgagcctggtccccccggccctgctggctttgctggcccccctggtgctgacggccaacctggtgctaaaggcgaacctggtgatgctggtgctaaaggcgatgctggtccccctggccctgccggacccgctggaccccctggccccattggtaatgttggtgctcctggagccaaaggtgctcgcggcagcgctggtccccctggtgctactggtttccctggtgctgctggccgagtcggtcctcctggcccctctggaaatgctggaccccctggccctcctggtcctgctggcaaagaaggcggcaaaggtccccgtggtgagactggccctgctggacgtcctggtgaagttggtccccctggtccccctggccctgctggcgagaaaggatcccctggtgctgatggtcctgctggtgctcctggtactcccgggcctcaaggtattgctggacagcgtggtgtggtcggcctgcctggtcagagaggagagagaggcttccctggtcttcctggcccctctggtgaacctggcaaacaaggtccctctggagcaagtggtgaacgtggtccccctggtcccatgggcccccctggattggctggaccccctggtgaatctggacgtgagggggctcctggtgccgaaggttcccctggacgagacggttctcctggcgccaagggtgaccgtggtgagaccggccccgctggaccccctggtgctcctggtgctcctggtgcccctggccccgttggccctgctggcaagagtggtgatcgtggtgagactggtcctgctggtcccaccggtcctgtcggccctgttggcgcccgtggccccgccggaccccaaggcccccgtggtgacaagggtgagacaggcgaacagggcgacagaggcataaagggtcaccgtggcttctctggcctccagggtccccctggccctcctggctctcctggtgaacaaggtccctctggagcctctggtcctgctggtccccgaggtccccctggctctgctggtgctcctggcaaagatggactcaacggtctccctggccccattgggccccctggtcctcgcggtcgcactggtgatgctggtcctgttggtccccccggccctcctggacctcctggtccccctggtcctcccagcgctggtttcgacttcagcttcctgccccagccacctcaagagaaggctcacgatggtggccgctactaccgggctgatgatgccaatgtggttcgtgaccgtgacctcgaggtggacaccaccctcaagagcctgagccagcagatcgagaacatccggagcccagagggcagccgcaagaaccccgcccgcacctgccgtgacctcaagatgtgccactctgactggaagagtggagagtactggattgaccccaaccaaggctgcaacctggatgccatcaaagtcttctgcaacatggagactggtgagacctgcgtgtaccccactcagcccagtgtggcccagaagaactggtacatcagcaagaaccccaaggacaagaggcatgtctggttcggcgagagcatgaccgatggattccagttcgagtatggcggccagggctccgaccttacgggtcttctcgtgggcaccctggacgtggtgctggactccagtgcccgcgtggccccttaccgcatcctgcaccagacccaggactcccaggtctactggacagtggcgtgtggttcttcccgcaaagagatcacaaaacactgggaatggctggaaaataacttgctccagacactgtccatcttcgacagtgaggaagatatcaccaccttcgtcaagggcaagatacacggaatcatcgcagaagagaacaagaacctgcagccccagggagacgaggaccccgggaagttcaaggaggctgagctgaagatgcggaagcagtttgggatgcctgagggcgagaagctggtgaattactactcctgcagctactggaagggccgcgtgccccggcagggctggctgtacctgacggtcaaccacctgtgcttctactccttcctgctggggaaggaagtgagcctcgtggtgcagtgggtggacataacgcgtctggagaagaacgccaccctgctcttccccgagagcatccgtgtggacacccgcgaccaggagctcttcttctccatgttcctcaacatcggcgagaccttcaagctcatggagcagttggccaacctggccatgcggcagctgctggacagcgagggcttcctggaggacaaggccctgcctaggcccatccggccacacaggaacatctcagccctgaagcgagacctggacgcccgagccaagaatgagtgctaccgagccacgttccggctgcccagggatgagcggctagacggccacacaagctgcaccctgtggacgccgttcaacaagctgcacatccctggccagatgttcatctccaacaactacatctgcttcgccagcaaggaggaggacgcttgccacctcatcatacccctgagggaggtgaccattgtcgaaaaagctgacagctccagcgtgctgcccagccccctgtccatcagcaccaaaagcaaaatgacattcctgtttgccaacctgaaagaccgtgatttcttggtgcagaggatctctgacttcctccagaaaacaccatccaagcagccaggcagtatcgggagcaggaaagccagtgttgtggaccctagcacagagtcttccccagctcctcaggaggggtcggagcagcccgccagcccagcctctcccctcagcagccgccagagcttctgtgcgcaggaggcgccaaccgcatcccagggcctgctgaagctcttccagaaaaactcgcccatggaggaccttggagccaagggggccaaggagaagatgaaagaggagtcatggcacatccacttcttcgagtacgggcgtggcgtgtgcatgtaccgcacagccaagacgcgggcactggtcctgaagggtatccctgagagcctccggggagagctgtggctcctcttctccggggcctggaatgagatggtgactcaccccgggtactatgctgagctggtggagaagtccaccgggaagtacagcctggccacagaggagatcgagcgagacctgcaccgctccatgcccgagcaccctgccttccagaacgagctggggattgctgccctccggcgggtgctgactgcctatgccttccgaaaccccaccatcggctactgccaggcaatgaacatcgtgacctcggtgctcctgctctatggcagtgaggaggaggccttctggctcctggtggccctgtgcgagcgcatgctgcccgactactacaacaccagggtggtgggagccctggtggaccaaggcatcttcgaagagctcacgagagacttcctgccgcagctctcggagaagatgcaggacctgggggtgatctccagcatctcgctgtcctggttcctgaccctcttcctcagcgtcatgcccttcgagagcgccgtggtcatcgtcgactgctttttctatgagggcatcaaggtgatcctgcaggtggccctggccgtcctggacgccaacatggagcagctgctgggctgcagcgacgagggcgaggccatgaccatgctgggcagatacctggataatgtggtcaacaagcagagtgtctctcctcctatcccgcacctccgtgccttgctgagcagcagcgatgacccccctgcagaggtggacatctttgagctcctgaaagtgtcctatgagaaattcagcagcctgagggccgaagacattgagcagatgcggtttaaacagaggctgaaagtgatccagtccttggaggacacggccaagaggagtgtggtccgagctatacctgtggacattggtttctccattgaagagctggaggacctttacatggtgtttaaggccaagcacctggctagccagtactgggggtgcagccgcacaatggccggccgtcgggaccccagcctgccctacctggagcagtaccggattgatgccagccagttccgggaactctttgccagcctgacaccctgggcctgtggctcccacacacctctgctggcagggcgcatgttcaggctcctggacgaaaacaaggactcgctgatcaacttcaaggagttcgtgacagggatgagcgggatgtaccacggggacctgacagagaagctcaaggtgctctacaagctacaccttcccccagctctgagcccagaggaagccgagtcagccctggaggcggcccattatttcacagaggacagctcctcagaagcatctcctctggcctcagatctggatcttttcctgccctgggaggctcaagaagcactaccacaggaagagcaagaaggaagtggaagtgaggagagaggagaggagaaggggaccagctctccggactatcggcactaccttcgaatgtgggccaaggagaaagaggctcagaaggagacgattaaggatcttcccaagatgaaccaggagcagttcattgagctgtgcaagacgctttacaacatgttcagtgaagaccccatggagcaggacctgtaccacgccatcgccaccgtggccagcctcctgctccgcatcggagaggtggggaagaagttctcagcccgcacaggcaggaagcccagggactgtgccactgaggaggacgagccaccagcacccgaactgcatcaggacgcagccagggagcttcagcccccagctgcaggagacccccaagccaaagcaggcggagacacacacctcggaaaagccccacaggagagccaggtggtggtggaggggggcagcggcgagggacagggctcaccctcccagctgctgtctgacgatgaaaccaaagacgacatgtccatgtcctcctactcggtggtcagcacgggctccctgcaatgtgaagaccttgcagacgacacggtgctggtgggcggggaggcctgcagccccacagcgcgcatcggcggcaccgtcgacaccgactggtgcatctcctttgagcagatcctggcctccatcctgacggagtccgtgctggtgaacttctttgagaagagagtggacattggactcaagatcaaggaccaaaagaaagtggagagacagttcagcaccgccagtgaccatgagcagcctggagtttccggctgatgcctgcagctgtgaggcctggcccaaggtgtcatcagtggggctggcctcatctcctcctgcctttcctcccttatcagtttctctttaaaggtgtgcccctcctgctctcccaggagcagtgagttgtgagtggaaagaaggctggtgcagacccagctgccttagacagattccctgggcctgcatctcctggcgccggctgcttctgggcccaggaagaggctgtggctcccaccttccttacacctggtgggagcccgcctcgcaccagctgcacctgcctagcattacaggctctcagatctgcccttgcttgcctcatacctctgtgctccacactgcggccaggccagctgagtccctccatccgtggatgctttcctgcagctatgtggtatgggggtcattcctgcctcttggcaccaggttggggggcatgtgcttgttgggcaccaaagtgatggaaccctcaggtgctctccgggagcctgaacctcctgactgaggaacatgggcagaacatgtttattgcacagagtgggcgctgcgcacaggcgtggctgtacacgtgctctcagctcatcatcctttccagtaactttaaaaaaacatccctcaggtcctgatatatttccttggattcatttcacttggctagaaattacactgtgctcaatgccttaataaatccctgaaagaaataaaaaccactgtgtgcaatgccttgctgtggcccccaaccactgcttaggcctcccaacttctccccaggccaagtatggggccctggctgtgttctggaagttcaagacacttagtcctccacagtgggtggaagagtgcaaggtctgccaggtcagatggagacgcagaacctgctggtgcaagctgggcaggtcctgaccaacctgcatcaggggatgccctgagctccacaggtcttcatgggcaggggttgtgggtcctggtgaaggaagtgcatcctcaggcctgggctgtagcaagctgtctgcccttgggttcaagaaccagactgtggagccaaaggtgaccgcagggggccccagggctggagccacaaggataccctcactttgcatgaggagctgaaactgaccagtgtccagtgttagcccccacatggggctgctcttgcttctactaaaagatacagcagttacccccttatccacaggggatacagtggatatctaaaaccagacccccagtggatgtctaaaaccacagataataacaaaccttatacatactgttttttcctatgcatacatacctgtgattaagtttatgaattaggcaccttaagagattgacaacaataactaataataaaatgtaacggttatactgtaa

SEQ ID NO: 773 - DNA, 9000 bp, Homo sapiens
  misc_feature (33)..(33): second gene starts at position 33
atgttcagctttgtggacctccggctcctgctcctcttagcggccaccgccctcctgacgcacggccaagaggaaggccaagtcgagggccaagacgaagacatcccaccaatcacctgcgtacagaacggcctcaggtaccatgaccgagacgtgtggaaacccgagccctgccggatctgcgtctgcgacaacggcaaggtgttgtgcgatgacgtgatctgtgacgagaccaagaactgccccggcgccgaagtccccgagggcgagtgctgtcccgtctgccccgacggctcagagtcacccaccgaccaagaaaccaccggcgtcgagggacccaagggagacactggcccccgaggcccaaggggacccgcaggcccccctggccgagatggcatccctggacagcctggacttcccggaccccccggaccccccggacctcccggaccccctggcctcggaggaaactttgctccccagctgtcttatggctatgatgagaaatcaaccggaggaatttccgtgcctggccccatgggtccctctggtcctcgtggtctccctggcccccctggtgcacctggtccccaaggcttccaaggtccccctggtgagcctggcgagcctggagcttcaggtcccatgggtccccgaggtcccccaggtccccctggaaagaatggagatgatggggaagctggaaaacctggtcgtcctggtgagcgtgggcctcctgggcctcagggtgctcgaggattgcccggaacagctggcctccctggaatgaagggacacagaggtttcagtggtttggatggtgccaagggagatgctggtcctgctggtcctaagggtgagcctggcagccctggtgaaaatggagctcctggtcagatgggcccccgtggcctgcctggtgagagaggtcgccctggagcccctggccctgctggtgctcgtggaaatgatggtgctactggtgctgccgggccccctggtcccaccggccccgctggtcctcctggcttccctggtgctgttggtgctaagggtgaagctggtccccaagggccccgaggctctgaaggtccccagggtgtgcgtggtgagcctggcccccctggccctgctggtgctgctggccctgctggaaaccctggtgctgatggacagcctggtgctaaaggtgccaatggtgctcctggtattgctggtgctcctggcttccctggtgcccgaggcccctctggaccccagggccccggcggccctcctggtcccaagggtaacagcggtgaacctggtgctcctggcagcaaaggagacactggtgctaagggagagcctggccctgttggtgttcaaggaccccctggccctgctggagaggaaggaaagcgaggagctcgaggtgaacccggacccactggcctgcccggaccccctggcgagcgtggtggacctggtagccgtggtttccctggcgcagatggtgttgctggtcccaagggtcccgctggtgaacgtggttctcctggccctgctggccccaaaggatctcctggtgaagctggtcgtcccggtgaagctggtctgcctggtgccaagggtctgactggaagccctggcagccctggtcctgatggcaaaactggcccccctggtcccgccggtcaagatggtcgccccggacccccaggcccacctggtgcccgtggtcaggctggtgtgatgggattccctggacctaaaggtgctgctggagagcccggcaaggctggagagcgaggtgttcccggaccccctggcgctgtcggtcctgctggcaaagatggagaggctggagctcagggaccccctggccctgctggtcccgctggcgagagaggtgaacaaggccctgctggctcccccggattccagggtctccctggtcctgctggtcctccaggtgaagcaggcaaacctggtgaacagggtgttcctggagaccttggcgcccctggcccctctggagcaagaggcgagagaggtttccctggcgagcgtggtgtgcaaggtccccctggtcctgctggtccccgaggggccaacggtgctcccggcaacgatggtgctaagggtgatgctggtgcccctggagctcccggtagccagggcgcccctggccttcagggaatgcctggtgaacgtggtgcagctggtcttccagggcctaagggtgacagaggtgatgctggtcccaaaggtgctgatggctctcctggcaaagatggcgtccgtggtctgactggccccattggtcctcctggccctgctggtgcccctggtgacaagggtgaaagtggtcccagcggccctgctggtcccactggagctcgtggtgcccccggagaccgtggtgagcctggtccccccggccctgctggctttgctggcccccctggtgctgacggccaacctggtgctaaaggcgaacctggtgatgctggtgctaaaggcgatgctggtccccctggccctgccggacccgctggaccccctggccccattggtaatgttggtgctcctggagccaaaggtgctcgcggcagcgctggtccccctggtgctactggtttccctggtgctgctggccgagtcggtcctcctggcccctctggaaatgctggaccccctggccctcctggtcctgctggcaaagaaggcggcaaaggtccccgtggtgagactggccctgctggacgtcctggtgaagttggtccccctggtccccctggccctgctggcgagaaaggatcccctggtgctgatggtcctgctggtgctcctggtactcccgggcctcaaggtattgctggacagcgtggtgtggtcggcctgcctggtcagagaggagagagaggcttccctggtcttcctggcccctctggtgaacctggcaaacaaggtccctctggagcaagtggtgaacgtggtccccctggtcccatgggcccccctggattggctggaccccctggtgaatctggacgtgagggggctcctggtgccgaaggttcccctggacgagacggttctcctggcgccaagggtgaccgtggtgagaccggccccgctggaccccctggtgctcctggtgctcctggtgcccctggccccgttggccctgctggcaagagtggtgatcgtggtgagactggtcctgctggtcccaccggtcctgtcggccctgttggcgcccgtggccccgccggaccccaaggcccccgtggtgacaagggtgagacaggcgaacagggcgacagaggcataaagggtcaccgtggcttctctggcctccagggtccccctggccctcctggctctcctggtgaacaaggtccctctggagcctctggtcctgctggtccccgaggtccccctggctctgctggtgctcctggcaaagatggactcaacggtctccctggccccattgggccccctggtcctcgcggtcgcactggtgatgctggtcctgttggtccccccggccctcctggacctcctggtccccctggtcctcccagcgctggtttcgacttcagcttcctgccccagccacctcaagagaaggctcacgatggtggccgctactaccgggctgatgatgccaatgtggttcgtgaccgtgacctcgaggtggacaccaccctcaagagcctgagccagcagatcgagaacatccggagcccagagggcagccgcaagaaccccgcccgcacctgccgtgacctcaagatgtgccactctgactggaagagtggagagtactggattgaccccaaccaaggctgcaacctggatgccatcaaagtcttctgcaacatggagactggtgagacctgcgtgtaccccactcagcccagtgtggcccagaagaactggtacatcagcaagaaccccaaggacaagaggcatgtctggttcggcgagagcatgaccgatggattccagttcgagtatggcggccagggctccgaccttacgggtcttctcgtgggcaccctggacgtggtgctggactccagtgcccgcgtggccccttaccgcatcctgcaccagacccaggactcccaggtctactggacagtggcgtgtggttcttcccgcaaagagatcacaaaacactgggaatggctggaaaataacttgctccagacactgtccatcttcgacagtgaggaagatatcaccaccttcgtcaagggcaagatacacggaatcatcgcagaagagaacaagaacctgcagccccagggagacgaggaccccgggaagttcaaggaggctgagctgaagatgcggaagcagtttgggatgcctgagggcgagaagctggtgaattactactcctgcagctactggaagggccgcgtgccccggcagggctggctgtacctgacggtcaaccacctgtgcttctactccttcctgctggggaaggaagtgagcctcgtggtgcagtgggtggacataacgcgtctggagaagaacgccaccctgctcttccccgagagcatccgtgtggacacccgcgaccaggagctcttcttctccatgttcctcaacatcggcgagaccttcaagctcatggagcagttggccaacctggccatgcggcagctgctggacagcgagggcttcctggaggacaaggccctgcctaggcccatccggccacacaggaacatctcagccctgaagcgagacctggacgcccgagccaagaatgagtgctaccgagccacgttccggctgcccagggatgagcggctagacggccacacaagctgcaccctgtggacgccgttcaacaagctgcacatccctggccagatgttcatctccaacaactacatctgcttcgccagcaaggaggaggacgcttgccacctcatcatacccctgagggaggtgaccattgtcgaaaaagctgacagctccagcgtgctgcccagccccctgtccatcagcaccaaaagcaaaatgacattcctgtttgccaacctgaaagaccgtgatttcttggtgcagaggatctctgacttcctccagaaaacaccatccaagcagccaggcagtatcgggagcaggaaagccagtgttgtggaccctagcacagagtcttccccagctcctcaggaggggtcggagcagcccgccagcccagcctctcccctcagcagccgccagagcttctgtgcgcaggaggcgccaaccgcatcccagggcctgctgaagctcttccagaaaaactcgcccatggaggaccttggagccaagggggccaaggagaagatgaaagaggagtcatggcacatccacttcttcgagtacgggcgtggcgtgtgcatgtaccgcacagccaagacgcgggcactggtcctgaagggtatccctgagagcctccggggagagctgtggctcctcttctccggggcctggaatgagatggtgactcaccccgggtactatgctgagctggtggagaagtccaccgggaagtacagcctggccacagaggagatcgagcgagacctgcaccgctccatgcccgagcaccctgccttccagaacgagctggggattgctgccctccggcgggtgctgactgcctatgccttccgaaaccccaccatcggctactgccaggcaatgaacatcgtgacctcggtgctcctgctctatggcagtgaggaggaggccttctggctcctggtggccctgtgcgagcgcatgctgcccgactactacaacaccagggtggtgggagccctggtggaccaaggcatcttcgaagagctcacgagagacttcctgccgcagctctcggagaagatgcaggacctgggggtgatctccagcatctcgctgtcctggttcctgaccctcttcctcagcgtcatgcccttcgagagcgccgtggtcatcgtcgactgctttttctatgagggcatcaaggtgatcctgcaggtggccctggccgtcctggacgccaacatggagcagctgctgggctgcagcgacgagggcgaggccatgaccatgctgggcagatacctggataatgtggtcaacaagcagagtgtctctcctcctatcccgcacctccgtgccttgctgagcagcagcgatgacccccctgcagaggtggacatctttgagctcctgaaagtgtcctatgagaaattcagcagcctgagggccgaagacattgagcagatgcggtttaaacagaggctgaaagtgatccagtccttggaggacacggccaagaggagtgtggtccgagctatacctgtggacattggtttctccattgaagagctggaggacctttacatggtgtttaaggccaagcacctggctagccagtactgggggtgcagccgcacaatggccggccgtcgggaccccagcctgccctacctggagcagtaccggattgatgccagccagttccgggaactctttgccagcctgacaccctgggcctgtggctcccacacacctctgctggcagggcgcatgttcaggctcctggacgaaaacaaggactcgctgatcaacttcaaggagttcgtgacagggatgagcgggatgtaccacggggacctgacagagaagctcaaggtgctctacaagctacaccttcccccagctctgagcccagaggaagccgagtcagccctggaggcggcccattatttcacagaggacagctcctcagaagaagcactaccacaggaagagcaagaaggaagtggaagtgaggagagaggagaggagaaggggaccagctctccggactatcggcactaccttcgaatgtgggccaaggagaaagaggctcagaaggagacgattaaggatcttcccaagatgaaccaggagcagttcattgagctgtgcaagacgctttacaacatgttcagtgaagaccccatggagcaggacctgtaccacgccatcgccaccgtggccagcctcctgctccgcatcggagaggtggggaagaagttctcagcccgcacaggcaggaagcccagggactgtgccactgaggaggacgagccaccagcacccgaactgcatcaggacgcagccagggagcttcagcccccagctgcaggagacccccaagccaaagcaggcggagacacacacctcggaaaagccccacaggagagccaggtggtggtggaggggggcagcggcgagggacagggctcaccctcccagctgctgtctgacgatgaaaccaaagacgacatgtccatgtcctcctactcggtggtcagcacgggctccctgcaatgtgaagaccttgcagacgacacggtgctggtgggcggggaggcctgcagccccacagcgcgcatcggcggcaccgtcgacaccgactggtgcatctcctttgagcagatcctggcctccatcctgacggagtccgtgctggtgaacttctttgagaagagagtggacattggactcaagatcaaggaccaaaagaaagtggagagacagttcagcaccgccagtgaccatgagcagcctggagtttccggctgatgcctgcagctgtgaggcctggcccaaggtgtcatcagtggggctggcctcatctcctcctgcctttcctcccttatcagtttctctttaaaggtgtgcccctcctgctctcccaggagcagtgagttgtgagtggaaagaaggctggtgcagacccagctgccttagacagattccctgggcctgcatctcctggcgccggctgcttctgggcccaggaagaggctgtggctcccaccttccttacacctggtgggagcccgcctcgcaccagctgcacctgcctagcattacaggctctcagatctgcccttgcttgcctcatacctctgtgctccacactgcggccaggccagctgagtccctccatccgtggatgctttcctgcagctatgtggtatgggggtcattcctgcctcttggcaccaggttggggggcatgtgcttgttgggcaccaaagtgatggaaccctcaggtgctctccgggagcctgaacctcctgactgaggaacatgggcagaacatgtttattgcacagagtgggcgctgcgcacaggcgtggctgtacacgtgctctcagctcatcatcctttccagtaactttaaaaaaacatccctcaggtcctgatatatttccttggattcatttcacttggctagaaattacactgtgctcaatgccttaataaatccctgaaagaaataaaaaccactgtgtgcaatgccttgctgtggcccccaaccactgcttaggcctcccaacttctccccaggccaagtatggggccctggctgtgttctggaagttcaagacacttagtcctccacagtgggtggaagagtgcaaggtctgccaggtcagatggagacgcagaacctgctggtgcaagctgggcaggtcctgaccaacctgcatcaggggatgccctgagctccacaggtcttcatgggcaggggttgtgggtcctggtgaaggaagtgcatcctcaggcctgggctgtagcaagctgtctgcccttgggttcaagaaccagactgtggagccaaaggtgaccgcagggggccccagggctggagccacaaggataccctcactttgcatgaggagctgaaactgaccagtgtccagtgttagcccccacatggggctgctcttgcttctactaaaagatacagcagttacccccttatccacaggggatacagtggatatctaaaaccagacccccagtggatgtctaaaaccacagataataacaaaccttatacatactgttttttcctatgcatacatacctgtgattaagtttatgaattaggcaccttaagagattgacaacaataactaataataaaatgtaacggttatactgtaa

SEQ ID NO: 774 - DNA, 2861 bp, Homo sapiens
  misc_feature (81)..(81): second gene starts at position 81
atgagtatgctcaggcttcagaagaggctcgcctctagtgtcctccgctgtggcaagaagaaggtctggttagaccccaatggtctcatcaaggtgaacgggcggcccctggagatgattgagccgcgcacgctacagtacaagctgctggagccagttctgcttctcggcaaggagcgatttgctggtgtagacatccgtgtccgtgtaaagggtggtggtcacgtggcccagatttatgctatccgtcagtccatctccaaagccctggtggcctattaccagaaatatgtggatgaggcttccaagaaggagatcaaagacatcctcatccagtatgaccggaccctgctggtagctgaccctcgtcgctgcgagtccaaaaagtttggaggccctggtgcccgcgctcgctaccagaaatcctaccgataagcccatcgtgactcaaaactcacttgtataataaacagtttttgagggattttaaagtttcaagaagaaaagcggccagggtggcccctagctttccttttccggttgcggcgccgcgcggtgaggttgtctagtccacgctcggagccatgccgtccaagggcccgctgcagtctgtgcaggtcttcggacgcaagaagacagcgacagctgtggcgcactgcaaacgcggcaatggtctcatcaaggtgaacgggcggcccctggagatgattgagccgcgcacgctacagtacaagctgctggagccagttctgcttctcggcaaggagcgatttgctggtgtagacatccgtgtccgtgtaaagggtggtggtcacgtggcccagatttatgctatccgtcagtccatctccaaagccctggtggcctattaccagaaatatgtggatgaggcttccaagaaggagatcaaagacatcctcatccagtatgaccggaccctgctggtagctgaccctcgtcgctgcgagtccaaaaagtttggaggccctggtgcccgcgctcgctaccagaaatcctaccgataagcccatcgtgactcaaaactcacttgtataataaacagtttttgagggattttaaagtttcaagaagaaaagcggccagggtggcccctagctttccttttccggttgcggcgccgcgcggtgaggttgtctagtccacgctcggagccatgccgtccaagggcccgctgcagtctgtgcaggtcttcggacgcaagaagacagcgacagctgtggcgcactgcaaacgcggcaatggtctcatcaaggtgaacgggcggcccctggagatgattgagccgcgcacgctacagtacaagctgctggagccagttctgcttctcggcaaggagcgatttgctggtgtagacatccgtgtccgtgtaaagggtggtggtcacgtggcccagatttatgctatccgtcagtccatctccaaagccctggtggcctattaccagaaatatgtggatgaggcttccaagaaggagatcaaagacatcctcatccagtatgaccggaccctgctggtagctgaccctcgtcgctgcgagtccaaaaagtttggaggccctggtgcccgcgctcgctaccagaaatcctaccgataagcccatcgtgactcaaaactcacttgtataataaacagtttttgagggattttaaagtttcaagaagaaaagcggccagggtggcccctagctttccttttccggttgcggcgccgcgcggtgaggttgtctagtccacgctcggagccatgccgtccaagggcccgctgcagtctgtgcaggtcttcggacgcaagaagacagcgacagctgtggcgcactgcaaacgcggcaatggtctcatcaaggtgaacgggcggcccctggagatgattgagccgcgcacgctacagtacaagctgctggagccagttctgcttctcggcaaggagcgatttgctggtgtagacatccgtgtccgtgtaaagggtggtggtcacgtggcccagatttatgctatccgtcagtccatctccaaagccctggtggcctattaccagaaatatgtggatgaggcttccaagaaggagatcaaagacatcctcatccagtatgaccggaccctgctggtagctgaccctcgtcgctgcgagtccaaaaagtttggaggccctggtgcccgcgctcgctaccagaaatcctaccgataagcccatcgtgactcaaaactcacttgtataataaacagtttttgagggattttaaagtttcaagaagaaaagcggccagggtggcccctagctttccttttccggttgcggcgccgcgcggtgaggttgtctagtccacgctcggagccatgccgtccaagggcccgctgcagtctgtgcaggtcttcggacgcaagaagacagcgacagctgtggcgcactgcaaacgcggcaatggtctcatcaaggtgaacgggcggcccctggagatgattgagccgcgcacgctacagtacaagctgctggagccagttctgcttctcggcaaggagcgatttgctggtgtagacatccgtgtccgtgtaaagggtggtggtcacgtggcccagatttatgctatccgtcagtccatctccaaagccctggtggcctattaccagaaatatgtggatgaggcttccaagaaggagatcaaagacatcctcatccagtatgaccggaccctgctggtagctgaccctcgtcgctgcgagtccaaaaagtttggaggccctggtgcccgcgctcgctaccagaaatcctaccgataagcccatcgtgactcaaaactcacttgtataataaacagtttttgagggattttaaagtttcaagaa

SEQ ID NO: 775 - DNA, 3714 bp, Homo sapiens
  misc_feature (6)..(6): second gene starts at position 6
atgagggcttgctctcaattttgcgcaagttgaaaagtgcaccagaccaggaggtgagaatacttctcctgggcttggataatgctggcaagaccactcttctgaagcagcttgcatctgaagacatcagccacatcacacctacacagggtttcaacatcaaaagtgtacaatcacaaggttttaaactgaatgtatgggacattggtggacagaggaaaatcagaccatactggaagaattattttgaaaataccgatattcttatatatgtaatcgacagtgcagacagaaaaagatttgaagagacgggtcaggaactagcggaattactggaggaagaaaaactaagttgtgtgccagtgctcatctttgctaataagcaggatttgctcacagcagcccctgcctctgaaattgcagaaggactgaacctgcataccatccgcgaccgagtctggcagatccagtcttgctcagctctcacaggagagggcgttcaggatggcatgaactgggtctgcaaaaatgtcaatgcaaagaagaaataaaatctagacgaatggagatgcaggagctgcgggagccgaattcggtcctgaaaaacactaatttgctgctttctgaccaaatgtttttccatctgtgtacagctccagctgtttgaagagagggaacaacacggtttagaaagaatccccattccagcagtagatttaactgatctctgaggttcagtatcatttttcaaataaaggaattatattatttcctctgcataattgaaatagtattaaatgtctcaaagcacatgattagaaaatgagatcttttaaatgagcaagagattgcattgcagtttagacaattccagtgggcttttttttcctctcaaaaaaaaaaaaagaaaaagaaaaagaggaagaagcagctttgctgagttcatttatttactgacccgtcccttgcattccctccatggttttgaaaccacagacagtgtttgctggtgctgtcagtgatttttaccgtcactagcccagccaggcttcagtctgtccgacaggaagctgctgggtgggggtggggggagaaaaggcagataattaaaccatctcatcgtcttgcaggtcggagactacgtatgtaatcctcactctttggacagaaaaaaaaaaaaaagtctttcttgcagacaagtcactacagaaacataccccatcccacccacccctgcctctgccccagccagccacacagagaagcaaattcttatgacttttgactgtaatgacatctggaatgtaaggagaggtgggaggtttaattccagaaaaattacaaggtccttaaaaagctctcacatcgagggctcaggctagcgtaaacaggctttctccagctcagtggagcagtgagcagccgactctgagattagctggcttctccacggccgtcctatagacaggatttctaaagctcaaagaattctgtgtttaaacgatcacaataggccgctgctatcagattttagaaataaatgcagctttaccatgaacctgctccactgagaaaagccaggcagatcgatttttagatcaatttttacagtgctggcaacttggtggtgtgggatgctcctggatggagagggtttgctgctggggaggacatgggtgtgtgtgtgactgcaggggtcgtgtccaaggaatcaagagtcaccccagctgctgggctcctctgcctctctgcagcagaatgtccgtcctctgttgattgattggagaggaatagcagaacatttctcctgcccctcgttgcaaaacgagcttgtttccctgaacctcagaaatcctcagcttcaaacatggggaaacaggccagagcattgcccggctcctgaattaaactctgttctggtgcctgagctcaggggttttcagagaatgaataagagactgtccagtgactggtgggtccctgggggccagctgccttctcatcctgggaggtggcccttcccaagcccatcagggcgtgtgagcagactgaaggggccgctgcagcccctggccctcaatacccagctgcttctggctaagagtgcagcagagactgaggcatagccagcttcaaaagcgatctgacatgaaagtcattaacaaagccagccgtgaaaaggtgccccagagttgctgtggacagacctgtaaggacttgcaaaacaaaagaaagtgaggggtttttttaacctcagagctagctgctctctgcagcctcctccactggcttctctggctcacccaagctctcccttacagaggcaacacagaattataaggaatcagaaatcccccttctaccaggctgcaaatgtggctctagcacttgcaaattgttttttcttccgaatagttcagcagggacaagttatctgaggggcaaaatgcctgcttggaggtctgcaattttggaacactgcagtatggaactttggcattggagggtctgtaaaatatttttgttcttttaccaccaacttaggggactgttttaaagagccatcccaaggcctctcctagcaggcagaagccactcctctgataacggcctctgtaaatgttctgatttgctctcagctgcagagacacagagacactgcagatgtcacacgctttcatcttccctttgagcccttttgaaccctcctggggctctggggtagatgagagaagcctgaaaaaggcagagtttgaaagctcccatttaaaaacaaaatactttttaaagccctcttgcctcttccctgcccactcctgccccctgaccagaagacagaatttgaagctggaaagggaagaccccttttcccctcctcctgtccccagtgagtcttagcgagacttttgccctgcgcacaattgcatctgaatgtgcgggggagagggctgggggccggagggcaggcaaggcctggggggtgctcgtgatatgtgctcaagccagttgtgggaaaaactcgagtcctcccctcctcccgacctaccccgtgtggctgcttttggctggattccctgcacccagtgcaacacaccctttccccttcactctcccttggttactatggaaacaagggtgtcattgatgtgggctgagctggggaacatgtcggtgcacagctgaaagtcagcgattatgccggcggttagaaatgtgccagggttaaaggagtccgcagctcccacggctgctgggaggacatggtcctgcccccttccttcctccctccctccgtctccacttctctctccttgcttttgacaaatttctttattcccctctggactaaagtagtggctatttttgtgccactctgcgccccaccctcactgttggccgctccttatccggcctggcctggagggtgacaccatgtcaccctcaccaggactcgtctctccattcccgtcagagtttgctttgatttccctttcctttccttctcggggaccagttcttacttccttttatttttagctctgcactccatgtggtttcagggttcagtctgatccatcaaaaggttctttttttataatcccttttgaaaatgataatcaaaggaagagatgtggtgtttggtcatgtggaaaactcaatgtataatttagacgtctgtcaaaaatccgacaaataaaatttagctggaacgaa

SEQ ID NO: 776 - DNA, 4006 bp, Homo sapiens
  misc_feature (298)..(298): second gene starts at position 298
gctgccattcggcaccggagtcgctccgcgctcccagaatgcaccggcagtccgcgggaaaccaaaatggcgaggggctgtattgaagtgggctgtgtttgaggccggtgtaagaacgctcattctacccccaacccttgtctccaaggacctcggtttgtgcgtgcatatgtgccgggtacccggtggggcgggtgcccagtaagtgctcggactcgcaggggaagcgcccacggggacggattggttgttttttcctgtatgaagcggttggcaccactgaagtgaccgaatgagggcttgctctcaattttgcgcaagttgaaaagtgcaccagaccaggaggtgagaatacttctcctgggcttggataatgctggcaagaccactcttctgaagcagcttgcatctgaagacatcagccacatcacacctacacagggtttcaacatcaaaagtgtacaatcacaaggttttaaactgaatgtatgggacattggtggacagaggaaaatcagaccatactggaagaattattttgaaaataccgatattcttatatatgtaatcgacagtgcagacagaaaaagatttgaagagacgggtcaggaactagcggaattactggaggaagaaaaactaagttgtgtgccagtgctcatctttgctaataagcaggatttgctcacagcagcccctgcctctgaaattgcagaaggactgaacctgcataccatccgcgaccgagtctggcagatccagtcttgctcagctctcacaggagagggcgttcaggatggcatgaactgggtctgcaaaaatgtcaatgcaaagaagaaataaaatctagacgaatggagatgcaggagctgcgggagccgaattcggtcctgaaaaacactaatttgctgctttctgaccaaatgtttttccatctgtgtacagctccagctgtttgaagagagggaacaacacggtttagaaagaatccccattccagcagtagatttaactgatctctgaggttcagtatcatttttcaaataaaggaattatattatttcctctgcataattgaaatagtattaaatgtctcaaagcacatgattagaaaatgagatcttttaaatgagcaagagattgcattgcagtttagacaattccagtgggcttttttttcctctcaaaaaaaaaaaaagaaaaagaaaaagaggaagaagcagctttgctgagttcatttatttactgacccgtcccttgcattccctccatggttttgaaaccacagacagtgtttgctggtgctgtcagtgatttttaccgtcactagcccagccaggcttcagtctgtccgacaggaagctgctgggtgggggtggggggagaaaaggcagataattaaaccatctcatcgtcttgcaggtcggagactacgtatgtaatcctcactctttggacagaaaaaaaaaaaaaagtctttcttgcagacaagtcactacagaaacataccccatcccacccacccctgcctctgccccagccagccacacagagaagcaaattcttatgacttttgactgtaatgacatctggaatgtaaggagaggtgggaggtttaattccagaaaaattacaaggtccttaaaaagctctcacatcgagggctcaggctagcgtaaacaggctttctccagctcagtggagcagtgagcagccgactctgagattagctggcttctccacggccgtcctatagacaggatttctaaagctcaaagaattctgtgtttaaacgatcacaataggccgctgctatcagattttagaaataaatgcagctttaccatgaacctgctccactgagaaaagccaggcagatcgatttttagatcaatttttacagtgctggcaacttggtggtgtgggatgctcctggatggagagggtttgctgctggggaggacatgggtgtgtgtgtgactgcaggggtcgtgtccaaggaatcaagagtcaccccagctgctgggctcctctgcctctctgcagcagaatgtccgtcctctgttgattgattggagaggaatagcagaacatttctcctgcccctcgttgcaaaacgagcttgtttccctgaacctcagaaatcctcagcttcaaacatggggaaacaggccagagcattgcccggctcctgaattaaactctgttctggtgcctgagctcaggggttttcagagaatgaataagagactgtccagtgactggtgggtccctgggggccagctgccttctcatcctgggaggtggcccttcccaagcccatcagggcgtgtgagcagactgaaggggccgctgcagcccctggccctcaatacccagctgcttctggctaagagtgcagcagagactgaggcatagccagcttcaaaagcgatctgacatgaaagtcattaacaaagccagccgtgaaaaggtgccccagagttgctgtggacagacctgtaaggacttgcaaaacaaaagaaagtgaggggtttttttaacctcagagctagctgctctctgcagcctcctccactggcttctctggctcacccaagctctcccttacagaggcaacacagaattataaggaatcagaaatcccccttctaccaggctgcaaatgtggctctagcacttgcaaattgttttttcttccgaatagttcagcagggacaagttatctgaggggcaaaatgcctgcttggaggtctgcaattttggaacactgcagtatggaactttggcattggagggtctgtaaaatatttttgttcttttaccaccaacttaggggactgttttaaagagccatcccaaggcctctcctagcaggcagaagccactcctctgataacggcctctgtaaatgttctgatttgctctcagctgcagagacacagagacactgcagatgtcacacgctttcatcttccctttgagcccttttgaaccctcctggggctctggggtagatgagagaagcctgaaaaaggcagagtttgaaagctcccatttaaaaacaaaatactttttaaagccctcttgcctcttccctgcccactcctgccccctgaccagaagacagaatttgaagctggaaagggaagaccccttttcccctcctcctgtccccagtgagtcttagcgagacttttgccctgcgcacaattgcatctgaatgtgcgggggagagggctgggggccggagggcaggcaaggcctggggggtgctcgtgatatgtgctcaagccagttgtgggaaaaactcgagtcctcccctcctcccgacctaccccgtgtggctgcttttggctggattccctgcacccagtgcaacacaccctttccccttcactctcccttggttactatggaaacaagggtgtcattgatgtgggctgagctggggaacatgtcggtgcacagctgaaagtcagcgattatgccggcggttagaaatgtgccagggttaaaggagtccgcagctcccacggctgctgggaggacatggtcctgcccccttccttcctccctccctccgtctccacttctctctccttgcttttgacaaatttctttattcccctctggactaaagtagtggctatttttgtgccactctgcgccccaccctcactgttggccgctccttatccggcctggcctggagggtgacaccatgtcaccctcaccaggactcgtctctccattcccgtcagagtttgctttgatttccctttcctttccttctcggggaccagttcttacttccttttatttttagctctgcactccatgtggtttcagggttcagtctgatccatcaaaaggttctttttttataatcccttttgaaaatgataatcaaaggaagagatgtggtgtttggtcatgtggaaaactcaatgtataatttagacgtctgtcaaaaatccgacaaataaaatttagctggaacgaa

SEQ ID NO: 777 - DNA, 3714 bp, Homo sapiens; identical to SEQ ID NO: 775
  misc_feature (6)..(6): second gene starts at position 6

SEQ ID NO: 778 - DNA, 4006 bp, Homo sapiens; identical to SEQ ID NO: 776
  misc_feature (298)..(298): second gene starts at position 298

SEQ ID NO: 779 - DNA, 3714 bp, Homo sapiens; identical to SEQ ID NO: 775
  misc_feature (6)..(6): second gene starts at position 6

SEQ ID NO: 780 - DNA, 4006 bp, Homo sapiens; identical to SEQ ID NO: 776
  misc_feature (298)..(298): second gene starts at position 298

SEQ ID NO: 781 - DNA, 3714 bp, Homo sapiens; identical to SEQ ID NO: 775
  misc_feature (6)..(6): second gene starts at postion 6

SEQ ID NO: 782 - DNA, 4006 bp, Homo sapiens; identical to SEQ ID NO: 776
  misc_feature (298)..(298): second gene starts at position 298

SEQ ID NO: 783 - DNA, 421 bp, Homo sapiens
  misc_feature (125)..(125): second gene starts at position 125
atggatgtgggcagcaaagaggtcctgatggagagcccgccggactactccgcagctccccggggccgatttggcattccctgctgcccagtgcacctgaaacgccttcttatcgtggtggtgggaccaccaaaccctccaaacagagcaacaacaagtacgcggccagcagctacctgagcctgacgcccgagcagtggaagtcccacagaagctacagctgccaggtcacgcatgaagggagcaccgtggagaagacagtggcccctacagaatgttcataggttcccaactctaaccccacccacgggagcctggagctgcaggatcccaggggaggggtctctctccccatcccaagtcatccagcccttctccctgcactcatgaaaccccaataaatatcctcattgacaaccag

SEQ ID NO: 784 - DNA, 421 bp, Homo sapiens; identical to SEQ ID NO: 783
  misc_feature (125)..(125): second gene starts at position 125

SEQ ID NO: 785 - DNA, 421 bp, Homo sapiens; identical to SEQ ID NO: 783
  misc_feature (125)..(125): second gene starts at position 125

SEQ ID NO: 786 - DNA, 421 bp, Homo sapiens; identical to SEQ ID NO: 783
  misc_feature (125)..(125): second gene starts at position 125

SEQ ID NO: 787 - DNA, 421 bp, Homo sapiens; identical to SEQ ID NO: 783
  misc_feature (125)..(125): second gene starts at position 125

SEQ ID NO: 788 - DNA, 421 bp, Homo sapiens; identical to SEQ ID NO: 783
  misc_feature (125)..(125): second gene starts at position 125

SEQ ID NO: 789 - DNA, 404 bp, Homo sapiens
  misc_feature (37)..(37): second gene starts at position 37
atgtggaggggaatagactccatctatccatatgagatttttcacccttgaattttattttgtgcattgttatctaacaataattgtatttgctttatattaaacataaaataagaattcatcatgaatgtctataatcccagcactttgggaggctgaggcagtggatcacttgaggtcaagagttcgagaccagcctggccagcatggtgaaaccccatctctactaaaaaaaaaaagaaaaatacaaaaaattagccacgtgtggtagcgcatgcctggagtcccagccactcaggaggctgacgcatggaaatcacttgaaccccagaggtgaacgttgtggtgagccaagattgtgctactgcattccagcctggacaacagggcaagactccatctca

SEQ ID NO: 790 - DNA, 404 bp, Homo sapiens; identical to SEQ ID NO: 789
  misc_feature (37)..(37): second gene starts at position 37

SEQ ID NO: 791 - DNA, 404 bp, Homo sapiens; identical to SEQ ID NO: 789
  misc_feature (37)..(37): second gene starts at position 37

SEQ ID NO: 792 - DNA, 404 bp, Homo sapiens; identical to SEQ ID NO: 789
  misc_feature (37)..(37): second gene starts at position 37

SEQ ID NO: 793 - DNA, 32765 bp, Homo sapiens
  misc_feature (322)..(322): second gene starts at position 322
atggcggcggcgatgaccttctgccggctgctgaaccggtgtggcgaggcggcgcggagcctgcccctgggcgccaggtgtttcggggtgcgggtctcgccgaccggggagaaggtcacgcacactggccaggtttatgatgataaagactacaggagaattcggtttgtaggtcgtcagaaagaggtgaatgaaaactttgccattgatttgatagcagagcagcccgtgagcgaggtggagactcgggtgatagcgtgcgatggcggcgggggagctcttggccacccaaaagtgtatataaacttggacaaagaaacatcatttttaaggtgtgcacttttattcaactggtctcaagtcagtgtacaggtaagccctggctgcctccacccactcccagggagaccaaaagccttcatacatctcaagttgggggacaaaaaagggggaagggggggcacgaaggctcatcattcaaaataaaacaaaataaaaaagtattaaggcgaagattaaaaaaattttgcattacataatttacacgaaagcaatgctatcacctcccctgtgtggacttgggagaggactgggccattctccttagagagaagtggggtggcttttaggatggcaagggacttcctgtaacaacgcatctcatatttggaatgactattaaaaaaacaacaatgtgcaatcaaagtcctcggccacattgtgaactttgggggatgctcgctccaaccgactgctgtcaccttcaccgttccagtttttaaatcctgagtcaagccaaaaaaaaaaaaaaaaccaaaacaaaacaaaaaaaacaaataaagccatgccaatctcatcttgttttctgcgcaagttaggttttgtcaagaaagggtgtaacgcaactaagtcatagtccgcctagaagcatttgcggtggacgatggaggggccggactcgtcatactcctgcttgctgatccacatctgctggaaggtggacagcgaggccaggatggagccgccgatccacacggagtacttgcgctcaggaggagcaatgatcttgatcttcattgtgctgggtgccagggcagtgatctccttctgcatcctgtcggcaatgccagggtacatggtggtgccgccagacagcactgtgttggcgtacaggtctttgcggatgtccacgtcacacttcatgatggagttgaaggtagtttcgtggatgccacaggactccatgcccaggaaggaaggctggaagagtgcctcagggcagcggaaccgctcattgccaatggtgatgacctggccgtcaggcagctcgtagctcttctccagggaggagctggaagcagccgtggccatctcttgctcgaagtccagggcgacgtagcacagcttctccttaatgtcacgcacgatttcccgctcggccgtggtggtgaagctgtagccgcgctcggtgaggatcttcatgaggtagtcagtcaggtcccggccagccaggtccagacgcaggatggcatgggggagggcatacccctcgtagatgggcacagtgtgggtgaccccgtcaccggagtccatcacgatgccagtggtacggccagaggcgtacagggatagcacagcctggatagcaacgtacatggctggggtgttgaaggtctcaaacatgatctgggtcatcttctcgcggttggccttggggttcaggggggcctcggtcagcagcacggggtgctcctcgggagccacacgcagctcattgtagaaggtgtggtgccagattttctccatgtcgtcccagttggtgacgatgccgtgctcgatggggtacttcagggtgaggatgcctctcttgctctgggcctcgtcgcccacataggaatccttctgacccatgcccaccatcacgccctggtgcctggggcgccccacgatggaggggaagacggcccggggggcatcgtcgcccgcgaagccggccttgcacatgccggagccgttgtcgacgacgagcgcggcgatatcatcatccatggtgagctggcggcgggtgtggacgggcggcggatcggcaaaggcgaggctctgtgctcgcggggcggacgcggtctcggcggttcatttttaaggtgtgcacttttattcaactggtctcaagtcagtgtacaggtaagccctggctgcctccacccactcccagggagaccaaaagccttcatacatctcaagttgggggacaaaaaagggggaagggggggcacgaaggctcatcattcaaaataaaacaaaataaaaaagtattaaggcgaagattaaaaaaattttgcattacataatttacacgaaagcaatgctatcacctcccctgtgtggacttgggagaggactgggccattctccttagagagaagtggggtggcttttaggatggcaagggacttcctgtaacaacgcatctcatatttggaatgactattaaaaaaacaacaatgtgcaatcaaagtcctcggccacattgtgaactttgggggatgctcgctccaaccgactgctgtcaccttcaccgttccagtttttaaatcctgagtcaagccaaaaaaaaaaaaaaaaccaaaacaaaacaaaaaaaacaaataaagccatgccaatctcatcttgttttctgcgcaagttaggttttgtcaagaaagggtgtaacgcaactaagtcatagtccgcctagaagcatttgcggtggacgatggaggggccggactcgtcatactcctgcttgctgatccacatctgctggaaggtggacagcgaggccaggatggagccgccgatccacacggagtacttgcgctcaggaggagcaatgatcttgatcttcattgtgctgggtgccagggcagtgatctccttctgcatcctgtcggcaatgccagggtacatggtggtgccgccagacagcactgtgttggcgtacaggtctttgcggatgtccacgtcacacttcatgatggagttgaaggtagtttcgtggatgccacaggactccatgcccaggaaggaaggctggaagagtgcctcagggcagcggaaccgctcattgccaatggtgatgacctggccgtcaggcagctcgtagctcttctccagggaggagctggaagcagccgtggccatctcttgctcgaagtccagggcgacgtagcacagcttctccttaatgtcacgcacgatttcccgctcggccgtggtggtgaagctgtagccgcgctcggtgaggatcttcatgaggtagtcagtcaggtcccggccagccaggtccagacgcaggatggcatgggggagggcatacccctcgtagatgggcacagtgtgggtgaccccgtcaccggagtccatcacgatgccagtggtacggccagaggcgtacagggatagcacagcctggatagcaacgtacatggctggggtgttgaaggtctcaaacatgatctgggtcatcttctcgcggttggccttggggttcaggggggcctcggtcagcagcacggggtgctcctcgggagccacacgcagctcattgtagaaggtgtggtgccagattttctccatgtcgtcccagttggtgacgatgccgtgctcgatggggtacttcagggtgaggatgcctctcttgctctgggcctcgtcgcccacataggaatccttctgacccatgcccaccatcacgccctggtgcctggggcgccccacgatggaggggaagacggcccggggggcatcgtcgcccgcgaagccggccttgcacatgccggagccgttgtcgacgacgagcgcggcgatatcatcatccatggtgagctggcggcgggtgtggacgggcggcggatcggcaaaggcgaggctctgtgctcgcggggcggacgcggtctcggcggttcatttttaaggtgtgcacttttattcaactggtctcaagtcagtgtacaggtaagccctggctgcctccacccactcccagggagaccaaaagccttcatacatctcaagttgggggacaaaaaagggggaagggggggcacgaaggctcatcattcaaaataaaacaaaataaaaaagtattaaggcgaagattaaaaaaattttgcattacataatttacacgaaagcaatgctatcacctcccctgtgtggacttgggagaggactgggccattctccttagagagaagtggggtggcttttaggatggcaagggacttcctgtaacaacgcatctcatatttggaatgactattaaaaaaacaacaatgtgcaatcaaagtcctcggccacattgtgaactttgggggatgctcgctccaaccgactgctgtcaccttcaccgttccagtttttaaatcctgagtcaagccaaaaaaaaaaaaaaaaccaaaacaaaacaaaaaaaacaaataaagccatgccaatctcatcttgttttctgcgcaagttaggttttgtcaagaaagggtgtaacgcaactaagtcatagtccgcctagaagcatttgcggtggacgatggaggggccggactcgtcatactcctgcttgctgatccacatctgctggaaggtggacagcgaggccaggatggagccgccgatccacacggagtacttgcgctcaggaggagcaatgatcttgatcttcattgtgctgggtgccagggcagtgatctccttctgcatcctgtcggcaatgccagggtacatggtggtgccgccagacagcactgtgttggcgtacaggtctttgcggatgtccacgtcacacttcatgatggagttgaaggtagtttcgtggatgccacaggactccatgcccaggaaggaaggctggaagagtgcctcagggcagcggaaccgctcattgccaatggtgatgacctggccgtcaggcagctcgtagctcttctccagggaggagctggaagcagccgtggccatctcttgctcgaagtccagggcgacgtagcacagcttctccttaatgtcacgcacgatttcccgctcggccgtggtggtgaagctgtagccgcgctcggtgaggatcttcatgaggtagtcagtcaggtcccggccagccaggtccagacgcaggatggcatgggggagggcatacccctcgtagatgggcacagtgtgggtgaccccgtcaccggagtccatcacgatgccagtggtacggccagaggcgtacagggatagcacagcctggatagcaacgtacatggctggggtgttgaaggtctcaaacatgatctgggtcatcttctcgcggttggccttggggttcaggggggcctcggtcagcagcacggggtgctcctcgggagccacacgcagctcattgtagaaggtgtggtgccagattttctccatgtcgtcccagttggtgacgatgccgtgctcgatggggtacttcagggtgaggatgcctctcttgctctgggcctcgtcgcccacataggaatccttctgacccatgcccaccatcacgccctggtgcctggggcgccccacgatggaggggaagacggcccggggggcatcgtcgcccgcgaagccggccttgcacatgccggagccgttgtcgacgacgagcgcggcgatatcatcatccatggtgagctggcggcgggtgtggacgggcggcggatcggcaaaggcgaggctctgtgctcgcggggcggacgcggtctcggcggttcatttttaaggtgtgcacttttattcaactggtctcaagtcagtgtacaggtaagccctggctgcctccacccactcccagggagaccaaaagccttcatacatctcaagttgggggacaaaaaagggggaagggggggcacgaaggctcatcattcaaaataaaacaaaataaaaaagtattaaggcgaagattaaaaaaattttgcattacataatttacacgaaagcaatgctatcacctcccctgtgtggacttgggagaggactgggccattctccttagagagaagtggggtggcttttaggatggcaagggacttcctgtaacaacgcatctcatatttggaatgactattaaaaaaacaacaatgtgcaatcaaagtcctcggccacattgtgaactttgggggatgctcgctccaaccgactgctgtcaccttcaccgttccagtttttaaatcctgagtcaagccaaaaaaaaaaaaaaaaccaaaacaaaacaaaaaaaacaaataaagccatgccaatctcatcttgttttctgcgcaagttaggttttgtcaagaaagggtgtaacgcaactaagtcatagtccgcctagaagcatttgcggtggacgatggaggggccggactcgtcatactcctgcttgctgatccacatctgctggaaggtggacagcgaggccaggatggagccgccgatccacacggagtacttgcgctcaggaggagcaatgatcttgatcttcattgtgctgggtgccagggcagtgatctccttctgcatcctgtcggcaatgccagggtacatggtggtgccgccagacagcactgtgttggcgtacaggtctttgcggatgtccacgtcacacttcatgatggagttgaaggtagtttcgtggatgccacaggactccatgcccaggaaggaaggctggaagagtgcctcagggcagcggaaccgctcattgccaatggtgatgacctggccgtcaggcagctcgtagctcttctccagggaggagctggaagcagccgtggccatctcttgctcgaagtccagggcgacgtagcacagcttctccttaatgtcacgcacgatttcccgctcggccgtggtggtgaagctgtagccgcgctcggtgaggatcttcatgaggtagtcagtcaggtcccggccagccaggtccagacgcaggatggcatgggggagggcatacccctcgtagatgggcacagtgtgggtgaccccgtcaccggagtccatcacgatgccagtggtacggccagaggcgtacagggatagcacagcctggatagcaacgtacatggctggggtgttgaaggtctcaaacatgatctgggtcatcttctcgcggttggccttggggttcaggggggcctcggtcagcagcacggggtgctcctcgggagccacacgcagctcattgtagaaggtgtggtgccagattttctccatgtcgtcccagttggtgacgatgccgtgctcgatggggtacttcagggtgaggatgcctctcttgctctgggcctcgtcgcccacataggaatccttctgacccatgcccaccatcacgccctggtgcctggggcgccccacgatggaggggaagacggcccggggggcatcgtcgcccgcgaagccggccttgcacatgccggagccgttgtcgacgacgagcgcggcgatatcatcatccatggtgagctggcggcgggtgtggacgggcggcggatcggcaaaggcgaggctctgtgctcgcggggcggacgcggtctcggcggttcatttttaaggtgtgcacttttattcaactggtctcaagtcagtgtacaggtaagccctggctgcctccacccactcccagggagaccaaaagccttcatacatctcaagttgggggacaaaaaagggggaagggggggcacgaaggctcatcattcaaaataaaacaaaataaaaaagtattaaggcgaagattaaaaaaattttgcattacataatttacacgaaagcaatgctatcacctcccctgtgtggacttgggagaggactgggccattctccttagagagaagtggggtggcttttaggatggcaagggacttcctgtaacaacgcatctcatatttggaatgactattaaaaaaacaacaatgtgcaatcaaagtcctcggccacattgtgaactttgggggatgctcgctccaaccgactgctgtcaccttcaccgttccagtttttaaatcctgagtcaagccaaaaaaaaaaaaaaaaccaaaacaaaacaaaaaaaacaaataaagccatgccaatctcatcttgttttctgcgcaagttaggttttgtcaagaaagggtgtaacgcaactaagtcatagtccgcctagaagcatttgcggtggacgatggaggggccggactcgtcatactcctgcttgctgatccacatctgctggaaggtggacagcgaggccaggatggagccgccgatccacacggagtacttgcgctcaggaggagcaatgatcttgatcttcattgtgctgggtgccagggcagtgatctccttctgcatcctgtcggcaatgccagggtacatggtggtgccgccagacagcactgtgttggcgtacaggtctttgcggatgtccacgtcacacttcatgatggagttgaaggtagtttcgtggatgccacaggactccatgcccaggaaggaaggctggaagagtgcctcagggcagcggaaccgctcattgccaatggtgatgacctggccgtcaggcagctcgtagctcttctccagggaggagctggaagcagccgtggccatctcttgctcgaagtccagggcgacgtagcacagcttctccttaatgtcacgcacgatttcccgctcggccgtggtggtgaagctgtagccgcgctcggtgaggatcttcatgaggtagtcagtcaggtcccggccagccaggtccagacgcaggatggcatgggggagggcatacccctcgtagatgggcacagtgtgggtgaccccgtcaccggagtccatcacgatgccagtggtacggccagaggcgtacagggatagcacagcctggatagcaacgtacatggctggggtgttgaaggtctcaaacatgatctgggtcatcttctcgcggttggccttggggttcaggggggcctcggtcagcagcacggggtgctcctcgggagccacacgcagctcattgtagaaggtgtggtgccagattttctccatgtcgtcccagttggtgacgatgccgtgctcgatggggtacttcagggtgaggatgcctctcttgctctgggcctcgtcgcccacataggaatccttctgacccatgcccaccatcacgccctggtgcctggggcgccccacgatggaggggaagacggcccggggggcatcgtcgcccgcgaagccggccttgcacatgccggagccgttgtcgacgacgagcgcggcgatatcatcatccatggtgagctggcggcgggtgtggacgggcggcggatcggcaaaggcgaggctctgtgctcgcggggcggacgcggtctcggcggttcatttttaaggtgtgcacttttattcaactggtctcaagtcagtgtacaggtaagccctggctgcctccacccactcccagggagaccaaaagccttcatacatctcaagttgggggacaaaaaagggggaagggggggcacgaaggctcatcattcaaaataaaacaaaataaaaaagtattaaggcgaagattaaaaaaattttgcattacataatttacacgaaagcaatgctatcacctcccctgtgtggacttgggagaggactgggccattctccttagagagaagtggggtggcttttaggatggcaagggacttcctgtaacaacgcatctcatatttggaatgactattaaaaaaacaacaatgtgcaatcaaagtcctcggccacattgtgaactttgggggatgctcgctccaaccgactgctgtcaccttcaccgttccagtttttaaatcctgagtcaagccaaaaaaaaaaaaaaaaccaaaacaaaacaaaaaaaacaaataaagccatgccaatctcatcttgttttctgcgcaagttaggttttgtcaagaaagggtgtaacgcaactaagtcatagtccgcctagaagcatttgcggtggacgatggaggggccggactcgtcatactcctgcttgctgatccacatctgctggaaggtggacagcgaggccaggatggagccgccgatccacacggagtacttgcgctcaggaggagcaatgatcttgatcttcattgtgctgggtgccagggcagtgatctccttctgcatcctgtcggcaatgccagggtacatggtggtgccgccagacagcactgtgttggcgtacaggtctttgcggatgtccacgtcacacttcatgatggagttgaaggtagtttcgtggatgccacaggactccatgcccaggaaggaaggctggaagagtgcctcagggcagcggaaccgctcattgccaatggtgatgacctggccgtcaggcagctcgtagctcttctccagggaggagctggaagcagccgtggccatctcttgctcgaagtccagggcgacgtagcacagcttctccttaatgtcacgcacgatttcccgctcggccgtggtggtgaagctgtagccgcgctcggtgaggatcttcatgaggtagtcagtcaggtcccggccagccaggtccagacgcaggatggcatgggggagggcatacccctcgtagatgggcacagtgtgggtgaccccgtcaccggagtccatcacgatgccagtggtacggccagaggcgtacagggatagcacagcctggatagcaacgtacatggctggggtgttgaaggtctcaaacatgatctgggtcatcttctcgcggttggccttggggttcaggggggcctcggtcagcagcacggggtgctcctcgggagccacacgcagctcattgtagaaggtgtggtgccagattttctccatgtcgtcccagttggtgacgatgccgtgctcgatggggtacttcagggtgaggatgcctctcttgctctgggcctcgtcgcccacataggaatccttctgacccatgcccaccatcacgccctggtgcctggggcgccccacgatggaggggaagacggcccggggggcatcgtcgcccgcgaagccggccttgcacatgccggagccgttgtcgacgacgagcgcggcgatatcatcatccatggtgagctggcggcgggtgtggacgggcggcggatcggcaaaggcgaggctctgtgctcgcggggcggacgcggtctcggcggttcatttttaaggtgtgcacttttattcaactggtctcaagtcagtgtacaggtaagccctggctgcctccacccactcccagggagaccaaaagccttcatacatctcaagttgggggacaaaaaagggggaagggggggcacgaaggctcatcattcaaaataaaacaaaataaaaaagtattaaggcgaagattaaaaaaattttgcattacataatttacacgaaagcaatgctatcacctcccctgtgtggacttgggagaggactgggccattctccttagagagaagtggggtggcttttaggatggcaagggacttcctgtaacaacgcatctcatatttggaatgactattaaaaaaacaacaatgtgcaatcaaagtcctcggccacattgtgaactttgggggatgctcgctccaaccgactgctgtcaccttcaccgttccagtttttaaatcctgagtcaagccaaaaaaaaaaaaaaaaccaaaacaaaacaaaaaaaacaaataaagccatgccaatctcatcttgttttctgcgcaagttaggttttgtcaagaaagggtgtaacgcaactaagtcatagtccgcctagaagcatttgcggtggacgatggaggggccggactcgtcatactcctgcttgctgatccacatctgctggaaggtggacagcgaggccaggatggagccgccgatccacacggagtacttgcgctcaggaggagcaatgatcttgatcttcattgtgctgggtgccagggcagtgatctccttctgcatcctgtcggcaatgccagggtacatggtggtgccgccagacagcactgtgttggcgtacaggtctttgcggatgtccacgtcacacttcatgatggagttgaaggtagtttcgtggatgccacaggactccatgcccaggaaggaaggctggaagagtgcctcagggcagcggaaccgctcattgccaatggtgatgacctggccgtcaggcagctcgtagctcttctccagggaggagctggaagcagccgtggccatctcttgctcgaagtccagggcgacgtagcacagcttctccttaatgtcacgcacgatttcccgctcggccgtggtggtgaagctgtagccgcgctcggtgaggatcttcatgaggtagtcagtcaggtcccggccagccaggtccagacgcaggatggcatgggggagggcatacccctcgtagatgggcacagtgtgggtgaccccgtcaccggagtccatcacgatgccagtggtacggccagaggcgtacagggatagcacagcctggatagcaacgtacatggctggggtgttgaaggtctcaaacatgatctgggtcatcttctcgcggttggccttggggttcaggggggcctcggtcagcagcacggggtgctcctcgggagccacacgcagctcattgtagaaggtgtggtgccagattttctccatgtcgtcccagttggtgacgatgccgtgctcgatggggtacttcagggtgaggatgcctctcttgctctgggcctcgtcgcccacataggaatccttctgacccatgcccaccatcacgccctggtgcctggggcgccccacgatggaggggaagacggcccggggggcatcgtcgcccgcgaagccggccttgcacatgccggagccgttgtcgacgacgagcgcggcgatatcatcatccatggtgagctggcggcgggtgtggacgggcggcggatcggcaaaggcgaggctctgtgctcgcggggcggacgcggtctcggcggttcatttttaaggtgtgcacttttattcaactggtctcaagtcagtgtacaggtaagccctggctgcctccacccactcccagggagaccaaaagccttcatacatctcaagttgggggacaaaaaagggggaagggggggcacgaaggctcatcattcaaaataaaacaaaataaaaaagtattaaggcgaagattaaaaaaattttgcattacataatttacacgaaagcaatgctatcacctcccctgtgtggacttgggagaggactgggccattctccttagagagaagtggggtggcttttaggatggcaagggacttcctgtaacaacgcatctcatatttggaatgactattaaaaaaacaacaatgtgcaatcaaagtcctcggccacattgtgaactttgggggatgctcgctccaaccgactgctgtcaccttcaccgttccagtttttaaatcctgagtcaagccaaaaaaaaaaaaaaaaccaaaacaaaacaaaaaaaacaaataaagccatgccaatctcatcttgttttctgcgcaagttaggttttgtcaagaaagggtgtaacgcaactaagtcatagtccgcctagaagcatttgcggtggacgatggaggggccggactcgtcatactcctgcttgctgatccacatctgctggaaggtggacagcgaggccaggatggagccgccgatccacacggagtacttgcgctcaggaggagcaatgatcttgatcttcattgtgctgggtgccagggcagtgatctccttctgcatcctgtcggcaatgccagggtacatggtggtgccgccagacagcactgtgttggcgtacaggtctttgcggatgtccacgtcacacttcatgatggagttgaaggtagtttcgtggatgccacaggactccatgcccaggaaggaaggctggaagagtgcctcagggcagcggaaccgctcattgccaatggtgatgacctggccgtcaggcagctcgtagctcttctccagggaggagctggaagcagccgtggccatctcttgctcgaagtccagggcgacgtagcacagcttctccttaatgtcacgcacgatttcccgctcggccgtggtggtgaagctgtagccgcgctcggtgaggatcttcatgaggtagtcagtcaggtcccggccagccaggtccagacgcaggatggcatgggggagggcatacccctcgtagatgggcacagtgtgggtgaccccgtcaccggagtccatcacgatgccagtggtacggccagaggcgtacagggatagcacagcctggatagcaacgtacatggctggggtgttgaaggtctcaaacatgatctgggtcatcttctcgcggttggccttggggttcaggggggcctcggtcagcagcacggggtgctcctcgggagccacacgcagctcattgtagaaggtgtggtgccagattttctccatgtcgtcccagttggtgacgatgccgtgctcgatggggtacttcagggtgaggatgcctctcttgctctgggcctcgtcgcccacataggaatccttctgacccatgcccaccatcacgccctggtgcctggggcgccccacgatggaggggaagacggcccggggggcatcgtcgcccgcgaagccggccttgcacatgccggagccgttgtcgacgacgagcgcggcgatatcatcatccatggtgagctggcggcgggtgtggacgggcggcggatcggcaaaggcgaggctctgtgctcgcggggcggacgcggtctcggcggttcatttttaaggtgtgcacttttattcaactggtctcaagtcagtgtacaggtaagccctggctgcctccacccactcccagggagaccaaaagccttcatacatctcaagttgggggacaaaaaagggggaagggggggcacgaaggctcatcattcaaaataaaacaaaataaaaaagtattaaggcgaagattaaaaaaattttgcattacataatttacacgaaagcaatgctatcacctcccctgtgtggacttgggagaggactgggccattctccttagagagaagtggggtggcttttaggatggcaagggacttcctgtaacaacgcatctcatatttggaatgactattaaaaaaacaacaatgtgcaatcaaagtcctcggccacattgtgaactttgggggatgctcgctccaaccgactgctgtcaccttcaccgttccagtttttaaatcctgagtcaagccaaaaaaaaaaaaaaaaccaaaacaaaacaaaaaaaacaaataaagccatgccaatctcatcttgttttctgcgcaagttaggttttgtcaagaaagggtgtaacgcaactaagtcatagtccgcctagaagcatttgcggtggacgatggaggggccggactcgtcatactcctgcttgctgatccacatctgctggaaggtggacagcgaggccaggatggagccgccgatccacacggagtacttgcgctcaggaggagcaatgatcttgatcttcattgtgctgggtgccagggcagtgatctccttctgcatcctgtcggcaatgccagggtacatggtggtgccgccagacagcactgtgttggcgtacaggtctttgcggatgtccacgtcacacttcatgatggagttgaaggtagtttcgtggatgccacaggactccatgcccaggaaggaaggctggaagagtgcctcagggcagcggaaccgctcattgccaatggtgatgacctggccgtcaggcagctcgtagctcttctccagggaggagctggaagcagccgtggccatctcttgctcgaagtccagggcgacgtagcacagcttctccttaatgtcacgcacgatttcccgctcggccgtggtggtgaagctgtagccgcgctcggtgaggatcttcatgaggtagtcagtcaggtcccggccagccaggtccagacgcaggatggcatgggggagggcatacccctcgtagatgggcacagtgtgggtgaccccgtcaccggagtccatcacgatgccagtggtacggccagaggcgtacagggatagcacagcctggatagcaacgtacatggctggggtgttgaaggtctcaaacatgatctgggtcatcttctcgcggttggccttggggttcaggggggcctcggtcagcagcacggggtgctcctcgggagccacacgcagctcattgtagaaggtgtggtgccagattttctccatgtcgtcccagttggtgacgatgccgtgctcgatggggtacttcagggtgaggatgcctctcttgctctgggcctcgtcgcccacataggaatccttctgacccatgcccaccatcacgccctggtgcctggggcgccccacgatggaggggaagacggcccggggggcatcgtcgcccgcgaagccggccttgcacatgccggagccgttgtcgacgacgagcgcggcgatatcatcatccatggtgagctggcggcgggtgtggacgggcggcggatcggcaaaggcgaggctctgtgctcgcggggcggacgcggtctcggcggttcatttttaaggtgtgcacttttattcaactggtctcaagtcagtgtacaggtaagccctggctgcctccacccactcccagggagaccaaaagccttcatacatctcaagttgggggacaaaaaagggggaagggggggcacgaaggctcatcattcaaaataaaacaaaataaaaaagtattaaggcgaagattaaaaaaattttgcattacataatttacacgaaagcaatgctatcacctcccctgtgtggacttgggagaggactgggccattctccttagagagaagtggggtggcttttaggatggcaagggacttcctgtaacaacgcatctcatatttggaatgactattaaaaaaacaacaatgtgcaatcaaagtcctcggccacattgtgaactttgggggatgctcgctccaaccgactgctgtcaccttcaccgttccagtttttaaatcctgagtcaagccaaaaaaaaaaaaaaaaccaaaacaaaacaaaaaaaacaaataaagccatgccaatctcatcttgttttctgcgcaagttaggttttgtcaagaaagggtgtaacgcaactaagtcatagtccgcctagaagcatttgcggtggacgatggaggggccggactcgtcatactcctgcttgctgatccacatctgctggaaggtggacagcgaggccaggatggagccgccgatccacacggagtacttgcgctcaggaggagcaatgatcttgatcttcattgtgctgggtgccagggcagtgatctccttctgcatcctgtcggcaatgccagggtacatggtggtgccgccagacagcactgtgttggcgtacaggtctttgcggatgtccacgtcacacttcatgatggagttgaaggtagtttcgtggatgccacaggactccatgcccaggaaggaaggctggaagagtgcctcagggcagcggaaccgctcattgccaatggtgatgacctggccgtcaggcagctcgtagctcttctccagggaggagctggaagcagccgtggccatctcttgctcgaagtccagggcgacgtagcacagcttctccttaatgtcacgcacgatttcccgctcggccgtggtggtgaagctgtagccgcgctcggtgaggatcttcatgaggtagtcagtcaggtcccggccagccaggtccagacgcaggatggcatgggggagggcatacccctcgtagatgggcacagtgtgggtgaccccgtcaccggagtccatcacgatgccagtggtacggccagaggcgtacagggatagcacagcctggatagcaacgtacatggctggggtgttgaaggtctcaaacatgatctgggtcatcttctcgcggttggccttggggttcaggggggcctcggtcagcagcacggggtgctcctcgggagccacacgcagctcattgtagaaggtgtggtgccagattttctccatgtcgtcccagttggtgacgatgccgtgctcgatggggtacttcagggtgaggatgcctctcttgctctgggcctcgtcgcccacataggaatccttctgacccatgcccaccatcacgccctggtgcctggggcgccccacgatggaggggaagacggcccggggggcatcgtcgcccgcgaagccggccttgcacatgccggagccgttgtcgacgacgagcgcggcgatatcatcatccatggtgagctggcggcgggtgtggacgggcggcggatcggcaaaggcgaggctctgtgctcgcggggcggacgcggtctcggcggttcatttttaaggtgtgcacttttattcaactggtctcaagtcagtgtacaggtaagccctggctgcctccacccactcccagggagaccaaaagccttcatacatctcaagttgggggacaaaaaagggggaagggggggcacgaaggctcatcattcaaaataaaacaaaataaaaaagtattaaggcgaagattaaaaaaattttgcattacataatttacacgaaagcaatgctatcacctcccctgtgtggacttgggagaggactgggccattctccttagagagaagtggggtggcttttaggatggcaagggacttcctgtaacaacgcatctcatatttggaatgactattaaaaaaacaacaatgtgcaatcaaagtcctcggccacattgtgaactttgggggatgctcgctccaaccgactgctgtcaccttcaccgttccagtttttaaatcctgagtcaagccaaaaaaaaaaaaaaaaccaaaacaaaacaaaaaaaacaaataaagccatgccaatctcatcttgttttctgcgcaagttaggttttgtcaagaaagggtgtaacgcaactaagtcatagtccgcctagaagcatttgcggtggacgatggaggggccggactcgtcatactcctgcttgctgatccacatctgctggaaggtggacagcgaggccaggatggagccgccgatccacacggagtacttgcgctcaggaggagcaatgatcttgatcttcattgtgctgggtgccagggcagtgatctccttctgcatcctgtcggcaatgccagggtacatggtggtgccgccagacagcactgtgttggcgtacaggtctttgcggatgtccacgtcacacttcatgatggagttgaaggtagtttcgtggatgccacaggactccatgcccaggaaggaaggctggaagagtgcctcagggcagcggaaccgctcattgccaatggtgatgacctggccgtcaggcagctcgtagctcttctccagggaggagctggaagcagccgtggccatctcttgctcgaagtccagggcgacgtagcacagcttctccttaatgtcacgcacgatttcccgctcggccgtggtggtgaagctgtagccgcgctcggtgaggatcttcatgaggtagtcagtcaggtcccggccagccaggtccagacgcaggatggcatgggggagggcatacccctcgtagatgggcacagtgtgggtgaccccgtcaccggagtccatcacgatgccagtggtacggccagaggcgtacagggatagcacagcctggatagcaacgtacatggctggggtgttgaaggtctcaaacatgatctgggtcatcttctcgcggttggccttggggttcaggggggcctcggtcagcagcacggggtgctcctcgggagccacacgcagctcattgtagaaggtgtggtgccagattttctccatgtcgtcccagttggtgacgatgccgtgctcgatggggtacttcagggtgaggatgcctctcttgctctgggcctcgtcgcccacataggaatccttctgacccatgcccaccatcacgccctggtgcctggggcgccccacgatggaggggaagacggcccggggggcatcgtcgcccgcgaagccggccttgcacatgccggagccgttgtcgacgacgagcgcggcgatatcatcatccatggtgagctggcggcgggtgtggacgggcggcggatcggcaaaggcgaggctctgtgctcgcggggcggacgcggtctcggcggttcatttttaaggtgtgcacttttattcaactggtctcaagtcagtgtacaggtaagccctggctgcctccacccactcccagggagaccaaaagccttcatacatctcaagttgggggacaaaaaagggggaagggggggcacgaaggctcatcattcaaaataaaacaaaataaaaaagtattaaggcgaagattaaaaaaattttgcattacataatttacacgaaagcaatgctatcacctcccctgtgtggacttgggagaggactgggccattctccttagagagaagtggggtggcttttaggatggcaagggacttcctgtaacaacgcatctcatatttggaatgactattaaaaaaacaacaatgtgcaatcaaagtcctcggccacattgtgaactttgggggatgctcgctccaaccgactgctgtcaccttcaccgttccagtttttaaatcctgagtcaagccaaaaaaaaaaaaaaaaccaaaacaaaacaaaaaaaacaaataaagccatgccaatctcatcttgttttctgcgcaagttaggttttgtcaagaaagggtgtaacgcaactaagtcatagtccgcctagaagcatttgcggtggacgatggaggggccggactcgtcatactcctgcttgctgatccacatctgctggaaggtggacagcgaggccaggatggagccgccgatccacacggagtacttgcgctcaggaggagcaatgatcttgatcttcattgtgctgggtgccagggcagtgatctccttctgcatcctgtcggcaatgccagggtacatggtggtgccgccagacagcactgtgttggcgtacaggtctttgcggatgtccacgtcacacttcatgatggagttgaaggtagtttcgtggatgccacaggactccatgcccaggaaggaaggctggaagagtgcctcagggcagcggaaccgctcattgccaatggtgatgacctggccgtcaggcagctcgtagctcttctccagggaggagctggaagcagccgtggccatctcttgctcgaagtccagggcgacgtagcacagcttctccttaatgtcacgcacgatttcccgctcggccgtggtggtgaagctgtagccgcgctcggtgaggatcttcatgaggtagtcagtcaggtcccggccagccaggtccagacgcaggatggcatgggggagggcatacccctcgtagatgggcacagtgtgggtgaccccgtcaccggagtccatcacgatgccagtggtacggccagaggcgtacagggatagcacagcctggatagcaacgtacatggctggggtgttgaaggtctcaaacatgatctgggtcatcttctcgcggttggccttggggttcaggggggcctcggtcagcagcacggggtgctcctcgggagccacacgcagctcattgtagaaggtgtggtgccagattttctccatgtcgtcccagttggtgacgatgccgtgctcgatggggtacttcagggtgaggatgcctctcttgctctgggcctcgtcgcccacataggaatccttctgacccatgcccaccatcacgccctggtgcctggggcgccccacgatggaggggaagacggcccggggggcatcgtcgcccgcgaagccggccttgcacatgccggagccgttgtcgacgacgagcgcggcgatatcatcatccatggtgagctggcggcgggtgtggacgggcggcggatcggcaaaggcgaggctctgtgctcgcggggcggacgcggtctcggcggttcatttttaaggtgtgcacttttattcaactggtctcaagtcagtgtacaggtaagccctggctgcctccacccactcccagggagaccaaaagccttcatacatctcaagttgggggacaaaaaagggggaagggggggcacgaaggctcatcattcaaaataaaacaaaataaaaaagtattaaggcgaagattaaaaaaattttgcattacataatttacacgaaagcaatgctatcacctcccctgtgtggacttgggagaggactgggccattctccttagagagaagtggggtggcttttaggatggcaagggacttcctgtaacaacgcatctcatatttggaatgactattaaaaaaacaacaatgtgcaatcaaagtcctcggccacattgtgaactttgggggatgctcgctccaaccgactgctgtcaccttcaccgttccagtttttaaatcctgagtcaagccaaaaaaaaaaaaaaaaccaaaacaaaacaaaaaaaacaaataaagccatgccaatctcatcttgttttctgcgcaagttaggttttgtcaagaaagggtgtaacgcaactaagtcatagtccgcctagaagcatttgcggtggacgatggaggggccggactcgtcatactcctgcttgctgatccacatctgctggaaggtggacagcgaggccaggatggagccgccgatccacacggagtacttgcgctcaggaggagcaatgatcttgatcttcattgtgctgggtgccagggcagtgatctccttctgcatcctgtcggcaatgccagggtacatggtggtgccgccagacagcactgtgttggcgtacaggtctttgcggatgtccacgtcacacttcatgatggagttgaaggtagtttcgtggatgccacaggactccatgcccaggaaggaaggctggaagagtgcctcagggcagcggaaccgctcattgccaatggtgatgacctggccgtcaggcagctcgtagctcttctccagggaggagctggaagcagccgtggccatctcttgctcgaagtccagggcgacgtagcacagcttctccttaatgtcacgcacgatttcccgctcggccgtggtggtgaagctgtagccgcgctcggtgaggatcttcatgaggtagtcagtcaggtcccggccagccaggtccagacgcaggatggcatgggggagggcatacccctcgtagatgggcacagtgtgggtgaccccgtcaccggagtccatcacgatgccagtggtacggccagaggcgtacagggatagcacagcctggatagcaacgtacatggctggggtgttgaaggtctcaaacatgatctgggtcatcttctcgcggttggccttggggttcaggggggcctcggtcagcagcacggggtgctcctcgggagccacacgcagctcattgtagaaggtgtggtgccagattttctccatgtcgtcccagttggtgacgatgccgtgctcgatggggtacttcagggtgaggatgcctctcttgctctgggcctcgtcgcccacataggaatccttctgacccatgcccaccatcacgccctggtgcctggggcgccccacgatggaggggaagacggcccggggggcatcgtcgcccgcgaagccggccttgcacatgccggagccgttgtcgacgacgagcgcggcgatatcatcatccatggtgagctggcggcgggtgtggacgggcggcggatcggcaaaggcgaggctctgtgctcgcggggcggacgcggtctcggcggttcatttttaaggtgtgcacttttattcaactggtctcaagtcagtgtacaggtaagccctggctgcctccacccactcccagggagaccaaaagccttcatacatctcaagttgggggacaaaaaagggggaagggggggcacgaaggctcatcattcaaaataaaacaaaataaaaaagtattaaggcgaagattaaaaaaattttgcattacataatttacacgaaagcaatgctatcacctcccctgtgtggacttgggagaggactgggccattctccttagagagaagtggggtggcttttaggatggcaagggacttcctgtaacaacgcatctcatatttggaatgactattaaaaaaacaacaatgtgcaatcaaagtcctcggccacattgtgaactttgggggatgctcgctccaaccgactgctgtcaccttcaccgttccagtttttaaatcctgagtcaagccaaaaaaaaaaaaaaaaccaaaacaaaacaaaaaaaacaaataaagccatgccaatctcatcttgttttctgcgcaagttaggttttgtcaagaaagggtgtaacgcaactaagtcatagtccgcctagaagcatttgcggtggacgatggaggggccggactcgtcatactcctgcttgctgatccacatctgctggaaggtggacagcgaggccaggatggagccgccgatccacacggagtacttgcgctcaggaggagcaatgatcttgatcttcattgtgctgggtgccagggcagtgatctccttctgcatcctgtcggcaatgccagggtacatggtggtgccgccagacagcactgtgttggcgtacaggtctttgcggatgtccacgtcacacttcatgatggagttgaaggtagtttcgtggatgccacaggactccatgcccaggaaggaaggctggaagagtgcctcagggcagcggaaccgctcattgccaatggtgatgacctggccgtcaggcagctcgtagctcttctccagggaggagctggaagcagccgtggccatctcttgctcgaagtccagggcgacgtagcacagcttctccttaatgtcacgcacgatttcccgctcggccgtggtggtgaagctgtagccgcgctcggtgaggatcttcatgaggtagtcagtcaggtcccggccagccaggtccagacgcaggatggcatgggggagggcatacccctcgtagatgggcacagtgtgggtgaccccgtcaccggagtccatcacgatgccagtggtacggccagaggcgtacagggatagcacagcctggatagcaacgtacatggctggggtgttgaaggtctcaaacatgatctgggtcatcttctcgcggttggccttggggttcaggggggcctcggtcagcagcacggggtgctcctcgggagccacacgcagctcattgtagaaggtgtggtgccagattttctccatgtcgtcccagttggtgacgatgccgtgctcgatggggtacttcagggtgaggatgcctctcttgctctgggcctcgtcgcccacataggaatccttctgacccatgcccaccatcacgccctggtgcctggggcgccccacgatggaggggaagacggcccggggggcatcgtcgcccgcgaagccggccttgcacatgccggagccgttgtcgacgacgagcgcggcgatatcatcatccatggtgagctggcggcgggtgtggacgggcggcggatcggcaaaggcgaggctctgtgctcgcggggcggacgcggtctcggcggttcatttttaaggtgtgcacttttattcaactggtctcaagtcagtgtacaggtaagccctggctgcctccacccactcccagggagaccaaaagccttcatacatctcaagttgggggacaaaaaagggggaagggggggcacgaaggctcatcattcaaaataaaacaaaataaaaaagtattaaggcgaagattaaaaaaattttgcattacataatttacacgaaagcaatgctatcacctcccctgtgtggacttgggagaggactgggccattctccttagagagaagtggggtggcttttaggatggcaagggacttcctgtaacaacgcatctcatatttggaatgactattaaaaaaacaacaatgtgcaatcaaagtcctcggccacattgtgaactttgggggatgctcgctccaaccgactgctgtcaccttcaccgttccagtttttaaatcctgagtcaagccaaaaaaaaaaaaaaaaccaaaacaaaacaaaaaaaacaaataaagccatgccaatctcatcttgttttctgcgcaagttaggttttgtcaagaaagggtgtaacgcaactaagtcatagtccgcctagaagcatttgcggtggacgatggaggggccggactcgtcatactcctgcttgctgatccacatctgctggaaggtggacagcgaggccaggatggagccgccgatccacacggagtacttgcgctcaggaggagcaatgatcttgatcttcattgtgctgggtgccagggcagtgatctccttctgcatcctgtcggcaatgccagggtacatggtggtgccgccagacagcactgtgttggcgtacaggtctttgcggatgtccacgtcacacttcatgatggagttgaaggtagtttcgtggatgccacaggactccatgcccaggaaggaaggctggaagagtgcctcagggcagcggaaccgctcattgccaatggtgatgacctggccgtcaggcagctcgtagctcttctccagggaggagctggaagcagccgtggccatctcttgctcgaagtccagggcgacgtagcacagcttctccttaatgtcacgcacgatttcccgctcggccgtggtggtgaagctgtagccgcgctcggtgaggatcttcatgaggtagtcagtcaggtcccggccagccaggtccagacgcaggatggcatgggggagggcatacccctcgtagatgggcacagtgtgggtgaccccgtcaccggagtccatcacgatgccagtggtacggccagaggcgtacagggatagcacagcctggatagcaacgtacatggctggggtgttgaaggtctcaaacatgatctgggtcatcttctcgcggttggccttggggttcaggggggcctcggtcagcagcacggggtgctcctcgggagccacacgcagctcattgtagaaggtgtggtgccagattttctccatgtcgtcccagttggtgacgatgccgtgctcgatggggtacttcagggtgaggatgcctctcttgctctgggcctcgtcgcccacataggaatccttctgacccatgcccaccatcacgccctggtgcctggggcgccccacgatggaggggaagacggcccggggggcatcgtcgcccgcgaagccggccttgcacatgccggagccgttgtcgacgacgagcgcggcgatatcatcatccatggtgagctggcggcgggtgtggacgggcggcggatcggcaaaggcgaggctctgtgctcgcggggcggacgcggtctcggcggttcatttttaaggtgtgcacttttattcaactggtctcaagtcagtgtacaggtaagccctggctgcctccacccactcccagggagaccaaaagccttcatacatctcaagttgggggacaaaaaagggggaagggggggcacgaaggctcatcattcaaaataaaacaaaataaaaaagtattaaggcgaagattaaaaaaattttgcattacataatttacacgaaagcaatgctatcacctcccctgtgtggacttgggagaggactgggccattctccttagagagaagtggggtggcttttaggatggcaagggacttcctgtaacaacgcatctcatatttggaatgactattaaaaaaacaacaatgtgcaatcaaagtcctcggccacattgtgaactttgggggatgctcgctccaaccgactgctgtcaccttcaccgttccagtttttaaatcctgagtcaagccaaaaaaaaaaaaaaaaccaaaacaaaacaaaaaaaacaaataaagccatgccaatctcatcttgttttctgcgcaagttaggttttgtcaagaaagggtgtaacgcaactaagtcatagtccgcctagaagcatttgcggtggacgatggaggggccggactcgtcatactcctgcttgctgatccacatctgctggaaggtggacagcgaggccaggatggagccgccgatccacacggagtacttgcgctcaggaggagcaatgatcttgatcttcattgtgctgggtgccagggcagtgatctccttctgcatcctgtcggcaatgccagggtacatggtggtgccgccagacagcactgtgttggcgtacaggtctttgcggatgtccacgtcacacttcatgatggagttgaaggtagtttcgtggatgccacaggactccatgcccaggaaggaaggctggaagagtgcctcagggcagcggaaccgctcattgccaatggtgatgacctggccgtcaggcagctcgtagctcttctccagggaggagctggaagcagccgtggccatctcttgctcgaagtccagggcgacgtagcacagcttctccttaatgtcacgcacgatttcccgctcggccgtggtggtgaagctgtagccgcgctcggtgaggatcttcatgaggtagtcagtcaggtcccggccagccaggtccagacgcaggatggcatgggggagggcatacccctcgtagatgggcacagtgtgggtgaccccgtcaccggagtccatcacgatgccagtggtacggccagaggcgtacagggatagcacagcctggatagcaacgtacatggctggggtgttgaaggtctcaaacatgatctgggtcatcttctcgcggttggccttggggttcaggggggcctcggtcagcagcacggggtgctcctcgggagccacacgcagctcattgtagaaggtgtggtgccagattttctccatgtcgtcccagttggtgacgatgccgtgctcgatggggtacttcagggtgaggatgcctctcttgctctgggcctcgtcgcccacataggaatccttctgacccatgcccaccatcacgccctggtgcctggggcgccccacgatggaggggaagacggcccggggggcatcgtcgcccgcgaagccggccttgcacatgccggagccgttgtcgacgacgagcgcggcgatatcatcatccatggtgagctggcggcgggtgtggacgggcggcggatcggcaaaggcgaggctctgtgctcgcggggcggacgcggtctcggcggttcatttttaaggtgtgcacttttattcaactggtctcaagtcagtgtacaggtaagccctggctgcctccacccactcccagggagaccaaaagccttcatacatctcaagttgggggacaaaaaagggggaagggggggcacgaaggctcatcattcaaaataaaacaaaataaaaaagtattaaggcgaagattaaaaaaattttgcattacataatttacacgaaagcaatgctatcacctcccctgtgtggacttgggagaggactgggccattctccttagagagaagtggggtggcttttaggatggcaagggacttcctgtaacaacgcatctcatatttggaatgactattaaaaaaacaacaatgtgcaatcaaagtcctcggccacattgtgaactttgggggatgctcgctccaaccgactgctgtcaccttcaccgttccagtttttaaatcctgagtcaagccaaaaaaaaaaaaaaaaccaaaacaaaacaaaaaaaacaaataaagccatgccaatctcatcttgttttctgcgcaagttaggttttgtcaagaaagggtgtaacgcaactaagtcatagtccgcctagaagcatttgcggtggacgatggaggggccggactcgtcatactcctgcttgctgatccacatctgctggaaggtggacagcgaggccaggatggagccgccgatccacacggagtacttgcgctcaggaggagcaatgatcttgatcttcattgtgctgggtgccagggcagtgatctccttctgcatcctgtcggcaatgccagggtacatggtggtgccgccagacagcactgtgttggcgtacaggtctttgcggatgtccacgtcacacttcatgatggagttgaaggtagtttcgtggatgccacaggactccatgcccaggaaggaaggctggaagagtgcctcagggcagcggaaccgctcattgccaatggtgatgacctggccgtcaggcagctcgtagctcttctccagggaggagctggaagcagccgtggccatctcttgctcgaagtccagggcgacgtagcacagcttctccttaatgtcacgcacgatttcccgctcggccgtggtggtgaagctgtagccgcgctcggtgaggatcttcatgaggtagtcagtcaggtcccggccagccaggtccagacgcaggatggcatgggggagggcatacccctcgtagatgggcacagtgtgggtgaccccgtcaccggagtccatcacgatgccagtggtacggccagaggcgtacagggatagcacagcctggatagcaacgtacatggctggggtgttgaaggtctcaaacatgatctgggtcatcttctcgcggttggccttggggttcaggggggcctcggtcagcagcacggggtgctcctcgggagccacacgcagctcattgtagaaggtgtggtgccagattttctccatgtcgtcccagttggtgacgatgccgtgctcgatggggtacttcagggtgaggatgcctctcttgctctgggcctcgtcgcccacataggaatccttctgacccatgcccaccatcacgccctggtgcctggggcgccccacgatggaggggaagacggcccggggggcatcgtcgcccgcgaagccggccttgcacatgccggagccgttgtcgacgacgagcgcggcgatatcatcatccatggtgagctggcggcgggtgtggacgggcggcggatcggcaaaggcgaggctctgtgctcgcggggcggacgcggtctcggcggttcatttttaaggtgtgcacttttattcaactggtctcaagtcagtgtacaggtaagccctggctgcctccacccactcccagggagaccaaaagccttcatacatctcaagttgggggacaaaaaagggggaagggggggcacgaaggctcatcattcaaaataaaacaaaataaaaaagtattaaggcgaagattaaaaaaattttgcattacataatttacacgaaagcaatgctatcacctcccctgtgtggacttgggagaggactgggccattctccttagagagaagtggggtggcttttaggatggcaagggacttcctgtaacaacgcatctcatatttggaatgactattaaaaaaacaacaatgtgcaatcaaagtcctcggccacattgtgaactttgggggatgctcgctccaaccgactgctgtcaccttcaccgttccagtttttaaatcctgagtcaagccaaaaaaaaaaaaaaaaccaaaacaaaacaaaaaaaacaaataaagccatgccaatctcatcttgttttctgcgcaagttaggttttgtcaagaaagggtgtaacgcaactaagtcatagtccgcctagaagcatttgcggtggacgatggaggggccggactcgtcatactcctgcttgctgatccacatctgctggaaggtggacagcgaggccaggatggagccgccgatccacacggagtacttgcgctcaggaggagcaatgatcttgatcttcattgtgctgggtgccagggcagtgatctccttctgcatcctgtcggcaatgccagggtacatggtggtgccgccagacagcactgtgttggcgtacaggtctttgcggatgtccacgtcacacttcatgatggagttgaaggtagtttcgtggatgccacaggactccatgcccaggaaggaaggctggaagagtgcctcagggcagcggaaccgctcattgccaatggtgatgacctggccgtcaggcagctcgtagctcttctccagggaggagctggaagcagccgtggccatctcttgctcgaagtccagggcgacgtagcacagcttctccttaatgtcacgcacgatttcccgctcggccgtggtggtgaagctgtagccgcgctcggtgaggatcttcatgaggtagtcagtcaggtcccggccagccaggtccagacgcaggatggcatgggggagggcatacccctcgtagatgggcacagtgtgggtgaccccgtcaccggagtccatcacgatgccagtggtacggccagaggcgtacagggatagcacagcctggatagcaacgtacatggctggggtgttgaaggtctcaaacatgatctgggtcatcttctcgcggttggccttggggttcaggggggcctcggtcagcagcacggggtgctcctcgggagccacacgcagctcattgtagaaggtgtggtgccagattttctccatgtcgtcccagttggtgacgatgccgtgctcgatggggtacttcagggtgaggatgcctctcttgctctgggcctcgtcgcccacataggaatccttctgacccatgcccaccatcacgccctggtgcctggggcgccccacgatggaggggaaga

SEQ ID NO: 794 - DNA, 26749 bp, Homo sapiens
  misc_feature (635)..(635): second gene starts at position 635
atgctcagctttgtggatacgcggactttgttgctgcttgcagtaaccttatgcctagcaacatgccaatctttacaagaggaaactgtaagaaagggcccagccggagatagaggaccacgtggagaaaggggtccaccaggccccccaggcagagatggtgaagatggtcccacaggccctcctggtccacctggtcctcctggcccccctggtctcggtgggaactttgctgctcagtatgatggaaaaggagttggacttggccctggaccaatgggcttaatgggacctagaggcccacctggtgcagctggagccccaggccctcaaggtttccaaggacctgctggtgagcctggtgaacctggtcaaactggtcctgcaggtgctcgtggtccagctggccctcctggcaaggctggtgaagatggtcaccctggaaaacccggacgacctggtgagagaggagttgttggaccacagggtgctcgtggtttccctggaactcctggacttcctggcttcaaaggcattaggggacacaatggtctggatggattgaagggacagcccggtgctcctggtgtgaagggtgaacctggtgcccctggtgaaaatggaactccaggtcaaacaggagcccgtgggcttcctggtgagagaggacgtgttggtgcccctggcccagctggtgcccgtggcagtgatggaagtgtgggtcccgtgggtcctgctggtcccattgggtctgctggccctccaggcttcccaggtgcccctggccccaagggtgaaattggagctgttggtaacgctggtcctgctggtcccgccggtccccgtggtgaagtgggtcttccaggcctctccggccccgttggacctcctggtaatcctggagcaaacggccttactggtgccaagggtgctgctggccttcccggcgttgctggggctcccggcctccctggaccccgcggtattcctggccctgttggtgctgccggtgctactggtgccagaggacttgttggtgagcctggtccagctggctccaaaggagagagcggtaacaagggtgagcccggctctgctgggccccaaggtcctcctggtcccagtggtgaagaaggaaagagaggccctaatggggaagctggatctgccggccctccaggacctcctgggctgagaggtagtcctggttctcgtggtcttcctggagctgatggcagagctggcgtcatgggccctcctggtagtcgtggtgcaagtggccctgctggagtccgaggacctaatggagatgctggtcgccctggggagcctggtctcatgggacccagaggtcttcctggttcccctggaaatatcggccccgctggaaaagaaggtcctgtcggcctccctggcatcgacggcaggcctggcccaattggcccagctggagcaagaggagagcctggcaacattggattccctggacccaaaggccccactggtgatcctggcaaaaacggtgataaaggtcatgctggtcttgctggtgctcggggtgctccaggtcctgatggaaacaatggtgctcagggacctcctggaccacagggtgttcaaggtggaaaaggtgaacagggtccccctggtcctccaggcttccagggtctgcctggcccctcaggtcccgctggtgaagttggcaaaccaggagaaaggggtctccatggtgagtttggtctccctggtcctgctggtccaagaggggaacgcggtcccccaggtgagagtggtgctgccggtcctactggtcctattggaagccgaggtccttctggacccccagggcctgatggaaacaagggtgaacctggtgtggttggtgctgtgggcactgctggtccatctggtcctagtggactcccaggagagaggggtgctgctggcatacctggaggcaagggagaaaagggtgaacctggtctcagaggtgaaattggtaaccctggcagagatggtgctcgtggtgctcctggtgctgtaggtgcccctggtcctgctggagccacaggtgaccggggcgaagctggggctgctggtcctgctggtcctgctggtcctcggggaagccctggtgaacgtggtgaggtcggtcctgctggccccaatggatttgctggtcctgctggtgctgctggtcaacctggtgctaaaggagaaagaggagccaaagggcctaagggtgaaaacggtgttgttggtcccacaggccccgttggagctgctggcccagctggtccaaatggtccccccggtcctgctggaagtcgtggtgatggaggcccccctggtatgactggtttccctggtgctgctggacggactggtcccccaggaccctctggtatttctggccctcctggtccccctggtcctgctgggaaagaagggcttcgtggtcctcgtggtgaccaaggtccagttggccgaactggagaagtaggtgcagttggtccccctggcttcgctggtgagaagggtccctctggagaggctggtactgctggacctcctggcactccaggtcctcagggtcttcttggtgctcctggtattctgggtctccctggctcggcggttccggtgtccggaggcgctgttccagccttccttcctgggtatggaatcttgcggcatccacgagaccaccttcaactccatcatgaagtgtgacgtggacatccgcaaagacctgtacgccaacacggtgctgtcgggcggcaccaccatgtacccgggcattgccgacaggatgcagaaggagatcaccgccctggcgcccagcaccatgaagatcaagatcatcgcacccccagagcgcaagtactcggtgtggatcggtggctccatcctggcctcactgtccaccttccagcagatgtggattagcaagcaggagtacgacgagtcgggcccctccatcgtccaccgcaaatgcttctaaacggactcagcagatgcgtagcatttgctgcatgggttaattgagaatagaaatttgcccctggcaaatgcacacacctcatgctagcctcacgaaactggaataagccttcgaaaagaaattgtccttgaagcttgtatctgatatcagcactggattgtagaacttgttgctgattttgaccttgtattgaagttaactgttccccttggtatttgtttaataccctgtacatatctttgagttcaacctttagtacgtgtggcttggtcacttcgtggctaaggtaagaacgtgcttgtggaagacaagtctgtggcttggtgagtctgtgtggccagcagcctctgatctgtgcagggtattaacgtgtcagggctgagtgttctgggatttctctagaggctggcaagaaccagttgttttgtcttgcgggtctgtcagggttggaaagtccaagccgtaggacccagtttcctttcttagctgatgtctttggccagaacaccgtgggctgttacttgctttgagttggaagcggtttgcatttacgcctgtaaatgtattcattcttaatttatgtaaggttttttttgtacgcaattctcgattctttgaagagatgacaacaaattttggttttctactgttatgtgagaacattaggccccagcaacacgtcattgtgtaaggaaaaataaaagtgctgccgtaaccgtctcagtcgccgctgccagctctcgcactctgttcttccgccgctccgccgtcgcgtttctctgccggtcgcaatggaagaagagatcgccgcgctggtcattgacaatggctccggcatgtgcaaagctggttttgctggggacgacgctccccgagccgtgtttccttccatcgtcgggcgccccagacaccagggcgtcatggtgggcatgggccagaaggactcctacgtgggcgacgaggcccagagcaagcgtggcatcctgaccctgaagtaccccattgagcatggcatcgtcaccaactgggacgacatggagaagatctggcaccacaccttctacaacgagctgcgcgtggccccggaggagcacccagtgctgctgaccgaggcccccctgaaccccaaggccaacagagagaagatgactcagattatgtttgagaccttcaacaccccggccatgtacgtggccatccaggccgtgctgtccctctacgcctctgggcgcaccactggcattgtcatggactctggagacggggtcacccacacggtgcccatctacgagggctacgccctcccccacgccatcctgcgtctggacctggctggccgggacctgaccgactacctcatgaagatcctcactgagcgaggctacagcttcaccaccacggccgagcgggaaatcgtgcgcgacatcaaggagaagctgtgctacgtcgccctggacttcgagcaggagatggccaccgccgcatcctcctcttctctggagaagagctacgagctgcccgatggccaggtcatcaccattggcaatgagcggttccggtgtccggaggcgctgttccagccttccttcctgggtatggaatcttgcggcatccacgagaccaccttcaactccatcatgaagtgtgacgtggacatccgcaaagacctgtacgccaacacggtgctgtcgggcggcaccaccatgtacccgggcattgccgacaggatgcagaaggagatcaccgccctggcgcccagcaccatgaagatcaagatcatcgcacccccagagcgcaagtactcggtgtggatcggtggctccatcctggcctcactgtccaccttccagcagatgtggattagcaagcaggagtacgacgagtcgggcccctccatcgtccaccgcaaatgcttctaaacggactcagcagatgcgtagcatttgctgcatgggttaattgagaatagaaatttgcccctggcaaatgcacacacctcatgctagcctcacgaaactggaataagccttcgaaaagaaattgtccttgaagcttgtatctgatatcagcactggattgtagaacttgttgctgattttgaccttgtattgaagttaactgttccccttggtatttgtttaataccctgtacatatctttgagttcaacctttagtacgtgtggcttggtcacttcgtggctaaggtaagaacgtgcttgtggaagacaagtctgtggcttggtgagtctgtgtggccagcagcctctgatctgtgcagggtattaacgtgtcagggctgagtgttctgggatttctctagaggctggcaagaaccagttgttttgtcttgcgggtctgtcagggttggaaagtccaagccgtaggacccagtttcctttcttagctgatgtctttggccagaacaccgtgggctgttacttgctttgagttggaagcggtttgcatttacgcctgtaaatgtattcattcttaatttatgtaaggttttttttgtacgcaattctcgattctttgaagagatgacaacaaattttggttttctactgttatgtgagaacattaggccccagcaacacgtcattgtgtaaggaaaaataaaagtgctgccgtaaccgtctcagtcgccgctgccagctctcgcactctgttcttccgccgctccgccgtcgcgtttctctgccggtcgcaatggaagaagagatcgccgcgctggtcattgacaatggctccggcatgtgcaaagctggttttgctggggacgacgctccccgagccgtgtttccttccatcgtcgggcgccccagacaccagggcgtcatggtgggcatgggccagaaggactcctacgtgggcgacgaggcccagagcaagcgtggcatcctgaccctgaagtaccccattgagcatggcatcgtcaccaactgggacgacatggagaagatctggcaccacaccttctacaacgagctgcgcgtggccccggaggagcacccagtgctgctgaccgaggcccccctgaaccccaaggccaacagagagaagatgactcagattatgtttgagaccttcaacaccccggccatgtacgtggccatccaggccgtgctgtccctctacgcctctgggcgcaccactggcattgtcatggactctggagacggggtcacccacacggtgcccatctacgagggctacgccctcccccacgccatcctgcgtctggacctggctggccgggacctgaccgactacctcatgaagatcctcactgagcgaggctacagcttcaccaccacggccgagcgggaaatcgtgcgcgacatcaaggagaagctgtgctacgtcgccctggacttcgagcaggagatggccaccgccgcatcctcctcttctctggagaagagctacgagctgcccgatggccaggtcatcaccattggcaatgagcggttccggtgtccggaggcgctgttccagccttccttcctgggtatggaatcttgcggcatccacgagaccaccttcaactccatcatgaagtgtgacgtggacatccgcaaagacctgtacgccaacacggtgctgtcgggcggcaccaccatgtacccgggcattgccgacaggatgcagaaggagatcaccgccctggcgcccagcaccatgaagatcaagatcatcgcacccccagagcgcaagtactcggtgtggatcggtggctccatcctggcctcactgtccaccttccagcagatgtggattagcaagcaggagtacgacgagtcgggcccctccatcgtccaccgcaaatgcttctaaacggactcagcagatgcgtagcatttgctgcatgggttaattgagaatagaaatttgcccctggcaaatgcacacacctcatgctagcctcacgaaactggaataagccttcgaaaagaaattgtccttgaagcttgtatctgatatcagcactggattgtagaacttgttgctgattttgaccttgtattgaagttaactgttccccttggtatttgtttaataccctgtacatatctttgagttcaacctttagtacgtgtggcttggtcacttcgtggctaaggtaagaacgtgcttgtggaagacaagtctgtggcttggtgagtctgtgtggccagcagcctctgatctgtgcagggtattaacgtgtcagggctgagtgttctgggatttctctagaggctggcaagaaccagttgttttgtcttgcgggtctgtcagggttggaaagtccaagccgtaggacccagtttcctttcttagctgatgtctttggccagaacaccgtgggctgttacttgctttgagttggaagcggtttgcatttacgcctgtaaatgtattcattcttaatttatgtaaggttttttttgtacgcaattctcgattctttgaagagatgacaacaaattttggttttctactgttatgtgagaacattaggccccagcaacacgtcattgtgtaaggaaaaataaaagtgctgccgtaaccgtctcagtcgccgctgccagctctcgcactctgttcttccgccgctccgccgtcgcgtttctctgccggtcgcaatggaagaagagatcgccgcgctggtcattgacaatggctccggcatgtgcaaagctggttttgctggggacgacgctccccgagccgtgtttccttccatcgtcgggcgccccagacaccagggcgtcatggtgggcatgggccagaaggactcctacgtgggcgacgaggcccagagcaagcgtggcatcctgaccctgaagtaccccattgagcatggcatcgtcaccaactgggacgacatggagaagatctggcaccacaccttctacaacgagctgcgcgtggccccggaggagcacccagtgctgctgaccgaggcccccctgaaccccaaggccaacagagagaagatgactcagattatgtttgagaccttcaacaccccggccatgtacgtggccatccaggccgtgctgtccctctacgcctctgggcgcaccactggcattgtcatggactctggagacggggtcacccacacggtgcccatctacgagggctacgccctcccccacgccatcctgcgtctggacctggctggccgggacctgaccgactacctcatgaagatcctcactgagcgaggctacagcttcaccaccacggccgagcgggaaatcgtgcgcgacatcaaggagaagctgtgctacgtcgccctggacttcgagcaggagatggccaccgccgcatcctcctcttctctggagaagagctacgagctgcccgatggccaggtcatcaccattggcaatgagcggttccggtgtccggaggcgctgttccagccttccttcctgggtatggaatcttgcggcatccacgagaccaccttcaactccatcatgaagtgtgacgtggacatccgcaaagacctgtacgccaacacggtgctgtcgggcggcaccaccatgtacccgggcattgccgacaggatgcagaaggagatcaccgccctggcgcccagcaccatgaagatcaagatcatcgcacccccagagcgcaagtactcggtgtggatcggtggctccatcctggcctcactgtccaccttccagcagatgtggattagcaagcaggagtacgacgagtcgggcccctccatcgtccaccgcaaatgcttctaaacggactcagcagatgcgtagcatttgctgcatgggttaattgagaatagaaatttgcccctggcaaatgcacacacctcatgctagcctcacgaaactggaataagccttcgaaaagaaattgtccttgaagcttgtatctgatatcagcactggattgtagaacttgttgctgattttgaccttgtattgaagttaactgttccccttggtatttgtttaataccctgtacatatctttgagttcaacctttagtacgtgtggcttggtcacttcgtggctaaggtaagaacgtgcttgtggaagacaagtctgtggcttggtgagtctgtgtggccagcagcctctgatctgtgcagggtattaacgtgtcagggctgagtgttctgggatttctctagaggctggcaagaaccagttgttttgtcttgcgggtctgtcagggttggaaagtccaagccgtaggacccagtttcctttcttagctgatgtctttggccagaacaccgtgggctgttacttgctttgagttggaagcggtttgcatttacgcctgtaaatgtattcattcttaatttatgtaaggttttttttgtacgcaattctcgattctttgaagagatgacaacaaattttggttttctactgttatgtgagaacattaggccccagcaacacgtcattgtgtaaggaaaaataaaagtgctgccgtaaccgtctcagtcgccgctgccagctctcgcactctgttcttccgccgctccgccgtcgcgtttctctgccggtcgcaatggaagaagagatcgccgcgctggtcattgacaatggctccggcatgtgcaaagctggttttgctggggacgacgctccccgagccgtgtttccttccatcgtcgggcgccccagacaccagggcgtcatggtgggcatgggccagaaggactcctacgtgggcgacgaggcccagagcaagcgtggcatcctgaccctgaagtaccccattgagcatggcatcgtcaccaactgggacgacatggagaagatctggcaccacaccttctacaacgagctgcgcgtggccccggaggagcacccagtgctgctgaccgaggcccccctgaaccccaaggccaacagagagaagatgactcagattatgtttgagaccttcaacaccccggccatgtacgtggccatccaggccgtgctgtccctctacgcctctgggcgcaccactggcattgtcatggactctggagacggggtcacccacacggtgcccatctacgagggctacgccctcccccacgccatcctgcgtctggacctggctggccgggacctgaccgactacctcatgaagatcctcactgagcgaggctacagcttcaccaccacggccgagcgggaaatcgtgcgcgacatcaaggagaagctgtgctacgtcgccctggacttcgagcaggagatggccaccgccgcatcctcctcttctctggagaagagctacgagctgcccgatggccaggtcatcaccattggcaatgagcggttccggtgtccggaggcgctgttccagccttccttcctgggtatggaatcttgcggcatccacgagaccaccttcaactccatcatgaagtgtgacgtggacatccgcaaagacctgtacgccaacacggtgctgtcgggcggcaccaccatgtacccgggcattgccgacaggatgcagaaggagatcaccgccctggcgcccagcaccatgaagatcaagatcatcgcacccccagagcgcaagtactcggtgtggatcggtggctccatcctggcctcactgtccaccttccagcagatgtggattagcaagcaggagtacgacgagtcgggcccctccatcgtccaccgcaaatgcttctaaacggactcagcagatgcgtagcatttgctgcatgggttaattgagaatagaaatttgcccctggcaaatgcacacacctcatgctagcctcacgaaactggaataagccttcgaaaagaaattgtccttgaagcttgtatctgatatcagcactggattgtagaacttgttgctgattttgaccttgtattgaagttaactgttccccttggtatttgtttaataccctgtacatatctttgagttcaacctttagtacgtgtggcttggtcacttcgtggctaaggtaagaacgtgcttgtggaagacaagtctgtggcttggtgagtctgtgtggccagcagcctctgatctgtgcagggtattaacgtgtcagggctgagtgttctgggatttctctagaggctggcaagaaccagttgttttgtcttgcgggtctgtcagggttggaaagtccaagccgtaggacccagtttcctttcttagctgatgtctttggccagaacaccgtgggctgttacttgctttgagttggaagcggtttgcatttacgcctgtaaatgtattcattcttaatttatgtaaggttttttttgtacgcaattctcgattctttgaagagatgacaacaaattttggttttctactgttatgtgagaacattaggccccagcaacacgtcattgtgtaaggaaaaataaaagtgctgccgtaaccgtctcagtcgccgctgccagctctcgcactctgttcttccgccgctccgccgtcgcgtttctctgccggtcgcaatggaagaagagatcgccgcgctggtcattgacaatggctccggcatgtgcaaagctggttttgctggggacgacgctccccgagccgtgtttccttccatcgtcgggcgccccagacaccagggcgtcatggtgggcatgggccagaaggactcctacgtgggcgacgaggcccagagcaagcgtggcatcctgaccctgaagtaccccattgagcatggcatcgtcaccaactgggacgacatggagaagatctggcaccacaccttctacaacgagctgcgcgtggccccggaggagcacccagtgctgctgaccgaggcccccctgaaccccaaggccaacagagagaagatgactcagattatgtttgagaccttcaacaccccggccatgtacgtggccatccaggccgtgctgtccctctacgcctctgggcgcaccactggcattgtcatggactctggagacggggtcacccacacggtgcccatctacgagggctacgccctcccccacgccatcctgcgtctggacctggctggccgggacctgaccgactacctcatgaagatcctcactgagcgaggctacagcttcaccaccacggccgagcgggaaatcgtgcgcgacatcaaggagaagctgtgctacgtcgccctggacttcgagcaggagatggccaccgccgcatcctcctcttctctggagaagagctacgagctgcccgatggccaggtcatcaccattggcaatgagcggttccggtgtccggaggcgctgttccagccttccttcctgggtatggaatcttgcggcatccacgagaccaccttcaactccatcatgaagtgtgacgtggacatccgcaaagacctgtacgccaacacggtgctgtcgggcggcaccaccatgtacccgggcattgccgacaggatgcagaaggagatcaccgccctggcgcccagcaccatgaagatcaagatcatcgcacccccagagcgcaagtactcggtgtggatcggtggctccatcctggcctcactgtccaccttccagcagatgtggattagcaagcaggagtacgacgagtcgggcccctccatcgtccaccgcaaatgcttctaaacggactcagcagatgcgtagcatttgctgcatgggttaattgagaatagaaatttgcccctggcaaatgcacacacctcatgctagcctcacgaaactggaataagccttcgaaaagaaattgtccttgaagcttgtatctgatatcagcactggattgtagaacttgttgctgattttgaccttgtattgaagttaactgttccccttggtatttgtttaataccctgtacatatctttgagttcaacctttagtacgtgtggcttggtcacttcgtggctaaggtaagaacgtgcttgtggaagacaagtctgtggcttggtgagtctgtgtggccagcagcctctgatctgtgcagggtattaacgtgtcagggctgagtgttctgggatttctctagaggctggcaagaaccagttgttttgtcttgcgggtctgtcagggttggaaagtccaagccgtaggacccagtttcctttcttagctgatgtctttggccagaacaccgtgggctgttacttgctttgagttggaagcggtttgcatttacgcctgtaaatgtattcattcttaatttatgtaaggttttttttgtacgcaattctcgattctttgaagagatgacaacaaattttggttttctactgttatgtgagaacattaggccccagcaacacgtcattgtgtaaggaaaaataaaagtgctgccgtaaccgtctcagtcgccgctgccagctctcgcactctgttcttccgccgctccgccgtcgcgtttctctgccggtcgcaatggaagaagagatcgccgcgctggtcattgacaatggctccggcatgtgcaaagctggttttgctggggacgacgctccccgagccgtgtttccttccatcgtcgggcgccccagacaccagggcgtcatggtgggcatgggccagaaggactcctacgtgggcgacgaggcccagagcaagcgtggcatcctgaccctgaagtaccccattgagcatggcatcgtcaccaactgggacgacatggagaagatctggcaccacaccttctacaacgagctgcgcgtggccccggaggagcacccagtgctgctgaccgaggcccccctgaaccccaaggccaacagagagaagatgactcagattatgtttgagaccttcaacaccccggccatgtacgtggccatccaggccgtgctgtccctctacgcctctgggcgcaccactggcattgtcatggactctggagacggggtcacccacacggtgcccatctacgagggctacgccctcccccacgccatcctgcgtctggacctggctggccgggacctgaccgactacctcatgaagatcctcactgagcgaggctacagcttcaccaccacggccgagcgggaaatcgtgcgcgacatcaaggagaagctgtgctacgtcgccctggacttcgagcaggagatggccaccgccgcatcctcctcttctctggagaagagctacgagctgcccgatggccaggtcatcaccattggcaatgagcggttccggtgtccggaggcgctgttccagccttccttcctgggtatggaatcttgcggcatccacgagaccaccttcaactccatcatgaagtgtgacgtggacatccgcaaagacctgtacgccaacacggtgctgtcgggcggcaccaccatgtacccgggcattgccgacaggatgcagaaggagatcaccgccctggcgcccagcaccatgaagatcaagatcatcgcacccccagagcgcaagtactcggtgtggatcggtggctccatcctggcctcactgtccaccttccagcagatgtggattagcaagcaggagtacgacgagtcgggcccctccatcgtccaccgcaaatgcttctaaacggactcagcagatgcgtagcatttgctgcatgggttaattgagaatagaaatttgcccctggcaaatgcacacacctcatgctagcctcacgaaactggaataagccttcgaaaagaaattgtccttgaagcttgtatctgatatcagcactggattgtagaacttgttgctgattttgaccttgtattgaagttaactgttccccttggtatttgtttaataccctgtacatatctttgagttcaacctttagtacgtgtggcttggtcacttcgtggctaaggtaagaacgtgcttgtggaagacaagtctgtggcttggtgagtctgtgtggccagcagcctctgatctgtgcagggtattaacgtgtcagggctgagtgttctgggatttctctagaggctggcaagaaccagttgttttgtcttgcgggtctgtcagggttggaaagtccaagccgtaggacccagtttcctttcttagctgatgtctttggccagaacaccgtgggctgttacttgctttgagttggaagcggtttgcatttacgcctgtaaatgtattcattcttaatttatgtaaggttttttttgtacgcaattctcgattctttgaagagatgacaacaaattttggttttctactgttatgtgagaacattaggccccagcaacacgtcattgtgtaaggaaaaataaaagtgctgccgtaaccgtctcagtcgccgctgccagctctcgcactctgttcttccgccgctccgccgtcgcgtttctctgccggtcgcaatggaagaagagatcgccgcgctggtcattgacaatggctccggcatgtgcaaagctggttttgctggggacgacgctccccgagccgtgtttccttccatcgtcgggcgccccagacaccagggcgtcatggtgggcatgggccagaaggactcctacgtgggcgacgaggcccagagcaagcgtggcatcctgaccctgaagtaccccattgagcatggcatcgtcaccaactgggacgacatggagaagatctggcaccacaccttctacaacgagctgcgcgtggccccggaggagcacccagtgctgctgaccgaggcccccctgaaccccaaggccaacagagagaagatgactcagattatgtttgagaccttcaacaccccggccatgtacgtggccatccaggccgtgctgtccctctacgcctctgggcgcaccactggcattgtcatggactctggagacggggtcacccacacggtgcccatctacgagggctacgccctcccccacgccatcctgcgtctggacctggctggccgggacctgaccgactacctcatgaagatcctcactgagcgaggctacagcttcaccaccacggccgagcgggaaatcgtgcgcgacatcaaggagaagctgtgctacgtcgccctggacttcgagcaggagatggccaccgccgcatcctcctcttctctggagaagagctacgagctgcccgatggccaggtcatcaccattggcaatgagcggttccggtgtccggaggcgctgttccagccttccttcctgggtatggaatcttgcggcatccacgagaccaccttcaactccatcatgaagtgtgacgtggacatccgcaaagacctgtacgccaacacggtgctgtcgggcggcaccaccatgtacccgggcattgccgacaggatgcagaaggagatcaccgccctggcgcccagcaccatgaagatcaagatcatcgcacccccagagcgcaagtactcggtgtggatcggtggctccatcctggcctcactgtccaccttccagcagatgtggattagcaagcaggagtacgacgagtcgggcccctccatcgtccaccgcaaatgcttctaaacggactcagcagatgcgtagcatttgctgcatgggttaattgagaatagaaatttgcccctggcaaatgcacacacctcatgctagcctcacgaaactggaataagccttcgaaaagaaattgtccttgaagcttgtatctgatatcagcactggattgtagaacttgttgctgattttgaccttgtattgaagttaactgttccccttggtatttgtttaataccctgtacatatctttgagttcaacctttagtacgtgtggcttggtcacttcgtggctaaggtaagaacgtgcttgtggaagacaagtctgtggcttggtgagtctgtgtggccagcagcctctgatctgtgcagggtattaacgtgtcagggctgagtgttctgggatttctctagaggctggcaagaaccagttgttttgtcttgcgggtctgtcagggttggaaagtccaagccgtaggacccagtttcctttcttagctgatgtctttggccagaacaccgtgggctgttacttgctttgagttggaagcggtttgcatttacgcctgtaaatgtattcattcttaatttatgtaaggttttttttgtacgcaattctcgattctttgaagagatgacaacaaattttggttttctactgttatgtgagaacattaggccccagcaacacgtcattgtgtaaggaaaaataaaagtgctgccgtaaccgtctcagtcgccgctgccagctctcgcactctgttcttccgccgctccgccgtcgcgtttctctgccggtcgcaatggaagaagagatcgccgcgctggtcattgacaatggctccggcatgtgcaaagctggttttgctggggacgacgctccccgagccgtgtttccttccatcgtcgggcgccccagacaccagggcgtcatggtgggcatgggccagaaggactcctacgtgggcgacgaggcccagagcaagcgtggcatcctgaccctgaagtaccccattgagcatggcatcgtcaccaactgggacgacatggagaagatctggcaccacaccttctacaacgagctgcgcgtggccccggaggagcacccagtgctgctgaccgaggcccccctgaaccccaaggccaacagagagaagatgactcagattatgtttgagaccttcaacaccccggccatgtacgtggccatccaggccgtgctgtccctctacgcctctgggcgcaccactggcattgtcatggactctggagacggggtcacccacacggtgcccatctacgagggctacgccctcccccacgccatcctgcgtctggacctggctggccgggacctgaccgactacctcatgaagatcctcactgagcgaggctacagcttcaccaccacggccgagcgggaaatcgtgcgcgacatcaaggagaagctgtgctacgtcgccctggacttcgagcaggagatggccaccgccgcatcctcctcttctctggagaagagctacgagctgcccgatggccaggtcatcaccattggcaatgagcggttccggtgtccggaggcgctgttccagccttccttcctgggtatggaatcttgcggcatccacgagaccaccttcaactccatcatgaagtgtgacgtggacatccgcaaagacctgtacgccaacacggtgctgtcgggcggcaccaccatgtacccgggcattgccgacaggatgcagaaggagatcaccgccctggcgcccagcaccatgaagatcaagatcatcgcacccccagagcgcaagtactcggtgtggatcggtggctccatcctggcctcactgtccaccttccagcagatgtggattagcaagcaggagtacgacgagtcgggcccctccatcgtccaccgcaaatgcttctaaacggactcagcagatgcgtagcatttgctgcatgggttaattgagaatagaaatttgcccctggcaaatgcacacacctcatgctagcctcacgaaactggaataagccttcgaaaagaaattgtccttgaagcttgtatctgatatcagcactggattgtagaacttgttgctgattttgaccttgtattgaagttaactgttccccttggtatttgtttaataccctgtacatatctttgagttcaacctttagtacgtgtggcttggtcacttcgtggctaaggtaagaacgtgcttgtggaagacaagtctgtggcttggtgagtctgtgtggccagcagcctctgatctgtgcagggtattaacgtgtcagggctgagtgttctgggatttctctagaggctggcaagaaccagttgttttgtcttgcgggtctgtcagggttggaaagtccaagccgtaggacccagtttcctttcttagctgatgtctttggccagaacaccgtgggctgttacttgctttgagttggaagcggtttgcatttacgcctgtaaatgtattcattcttaatttatgtaaggttttttttgtacgcaattctcgattctttgaagagatgacaacaaattttggttttctactgttatgtgagaacattaggccccagcaacacgtcattgtgtaaggaaaaataaaagtgctgccgtaaccgtctcagtcgccgctgccagctctcgcactctgttcttccgccgctccgccgtcgcgtttctctgccggtcgcaatggaagaagagatcgccgcgctggtcattgacaatggctccggcatgtgcaaagctggttttgctggggacgacgctccccgagccgtgtttccttccatcgtcgggcgccccagacaccagggcgtcatggtgggcatgggccagaaggactcctacgtgggcgacgaggcccagagcaagcgtggcatcctgaccctgaagtaccccattgagcatggcatcgtcaccaactgggacgacatggagaagatctggcaccacaccttctacaacgagctgcgcgtggccccggaggagcacccagtgctgctgaccgaggcccccctgaaccccaaggccaacagagagaagatgactcagattatgtttgagaccttcaacaccccggccatgtacgtggccatccaggccgtgctgtccctctacgcctctgggcgcaccactggcattgtcatggactctggagacggggtcacccacacggtgcccatctacgagggctacgccctcccccacgccatcctgcgtctggacctggctggccgggacctgaccgactacctcatgaagatcctcactgagcgaggctacagcttcaccaccacggccgagcgggaaatcgtgcgcgacatcaaggagaagctgtgctacgtcgccctggacttcgagcaggagatggccaccgccgcatcctcctcttctctggagaagagctacgagctgcccgatggccaggtcatcaccattggcaatgagcggttccggtgtccggaggcgctgttccagccttccttcctgggtatggaatcttgcggcatccacgagaccaccttcaactccatcatgaagtgtgacgtggacatccgcaaagacctgtacgccaacacggtgctgtcgggcggcaccaccatgtacccgggcattgccgacaggatgcagaaggagatcaccgccctggcgcccagcaccatgaagatcaagatcatcgcacccccagagcgcaagtactcggtgtggatcggtggctccatcctggcctcactgtccaccttccagcagatgtggattagcaagcaggagtacgacgagtcgggcccctccatcgtccaccgcaaatgcttctaaacggactcagcagatgcgtagcatttgctgcatgggttaattgagaatagaaatttgcccctggcaaatgcacacacctcatgctagcctcacgaaactggaataagccttcgaaaagaaattgtccttgaagcttgtatctgatatcagcactggattgtagaacttgttgctgattttgaccttgtattgaagttaactgttccccttggtatttgtttaataccctgtacatatctttgagttcaacctttagtacgtgtggcttggtcacttcgtggctaaggtaagaacgtgcttgtggaagacaagtctgtggcttggtgagtctgtgtggccagcagcctctgatctgtgcagggtattaacgtgtcagggctgagtgttctgggatttctctagaggctggcaagaaccagttgttttgtcttgcgggtctgtcagggttggaaagtccaagccgtaggacccagtttcctttcttagctgatgtctttggccagaacaccgtgggctgttacttgctttgagttggaagcggtttgcatttacgcctgtaaatgtattcattcttaatttatgtaaggttttttttgtacgcaattctcgattctttgaagagatgacaacaaattttggttttctactgttatgtgagaacattaggccccagcaacacgtcattgtgtaaggaaaaataaaagtgctgccgtaaccgtctcagtcgccgctgccagctctcgcactctgttcttccgccgctccgccgtcgcgtttctctgccggtcgcaatggaagaagagatcgccgcgctggtcattgacaatggctccggcatgtgcaaagctggttttgctggggacgacgctccccgagccgtgtttccttccatcgtcgggcgccccagacaccagggcgtcatggtgggcatgggccagaaggactcctacgtgggcgacgaggcccagagcaagcgtggcatcctgaccctgaagtaccccattgagcatggcatcgtcaccaactgggacgacatggagaagatctggcaccacaccttctacaacgagctgcgcgtggccccggaggagcacccagtgctgctgaccgaggcccccctgaaccccaaggccaacagagagaagatgactcagattatgtttgagaccttcaacaccccggccatgtacgtggccatccaggccgtgctgtccctctacgcctctgggcgcaccactggcattgtcatggactctggagacggggtcacccacacggtgcccatctacgagggctacgccctcccccacgccatcctgcgtctggacctggctggccgggacctgaccgactacctcatgaagatcctcactgagcgaggctacagcttcaccaccacggccgagcgggaaatcgtgcgcgacatcaaggagaagctgtgctacgtcgccctggacttcgagcaggagatggccaccgccgcatcctcctcttctctggagaagagctacgagctgcccgatggccaggtcatcaccattggcaatgagcggttccggtgtccggaggcgctgttccagccttccttcctgggtatggaatcttgcggcatccacgagaccaccttcaactccatcatgaagtgtgacgtggacatccgcaaagacctgtacgccaacacggtgctgtcgggcggcaccaccatgtacccgggcattgccgacaggatgcagaaggagatcaccgccctggcgcccagcaccatgaagatcaagatcatcgcacccccagagcgcaagtactcggtgtggatcggtggctccatcctggcctcactgtccaccttccagcagatgtggattagcaagcaggagtacgacgagtcgggcccctccatcgtccaccgcaaatgcttctaaacggactcagcagatgcgtagcatttgctgcatgggttaattgagaatagaaatttgcccctggcaaatgcacacacctcatgctagcctcacgaaactggaataagccttcgaaaagaaattgtccttgaagcttgtatctgatatcagcactggattgtagaacttgttgctgattttgaccttgtattgaagttaactgttccccttggtatttgtttaataccctgtacatatctttgagttcaacctttagtacgtgtggcttggtcacttcgtggctaaggtaagaacgtgcttgtggaagacaagtctgtggcttggtgagtctgtgtggccagcagcctctgatctgtgcagggtattaacgtgtcagggctgagtgttctgggatttctctagaggctggcaagaaccagttgttttgtcttgcgggtctgtcagggttggaaagtccaagccgtaggacccagtttcctttcttagctgatgtctttggccagaacaccgtgggctgttacttgctttgagttggaagcggtttgcatttacgcctgtaaatgtattcattcttaatttatgtaaggttttttttgtacgcaattctcgattctttgaagagatgacaacaaattttggttttctactgttatgtgagaacattaggccccagcaacacgtcattgtgtaaggaaaaataaaagtgctgccgtaaccgtctcagtcgccgctgccagctctcgcactctgttcttccgccgctccgccgtcgcgtttctctgccggtcgcaatggaagaagagatcgccgcgctggtcattgacaatggctccggcatgtgcaaagctggttttgctggggacgacgctccccgagccgtgtttccttccatcgtcgggcgccccagacaccagggcgtcatggtgggcatgggccagaaggactcctacgtgggcgacgaggcccagagcaagcgtggcatcctgaccctgaagtaccccattgagcatggcatcgtcaccaactgggacgacatggagaagatctggcaccacaccttctacaacgagctgcgcgtggccccggaggagcacccagtgctgctgaccgaggcccccctgaaccccaaggccaacagagagaagatgactcagattatgtttgagaccttcaacaccccggccatgtacgtggccatccaggccgtgctgtccctctacgcctctgggcgcaccactggcattgtcatggactctggagacggggtcacccacacggtgcccatctacgagggctacgccctcccccacgccatcctgcgtctggacctggctggccgggacctgaccgactacctcatgaagatcctcactgagcgaggctacagcttcaccaccacggccgagcgggaaatcgtgcgcgacatcaaggagaagctgtgctacgtcgccctggacttcgagcaggagatggccaccgccgcatcctcctcttctctggagaagagctacgagctgcccgatggccaggtcatcaccattggcaatgagcggttccggtgtccggaggcgctgttccagccttccttcctgggtatggaatcttgcggcatccacgagaccaccttcaactccatcatgaagtgtgacgtggacatccgcaaagacctgtacgccaacacggtgctgtcgggcggcaccaccatgtacccgggcattgccgacaggatgcagaaggagatcaccgccctggcgcccagcaccatgaagatcaagatcatcgcacccccagagcgcaagtactcggtgtggatcggtggctccatcctggcctcactgtccaccttccagcagatgtggattagcaagcaggagtacgacgagtcgggcccctccatcgtccaccgcaaatgcttctaaacggactcagcagatgcgtagcatttgctgcatgggttaattgagaatagaaatttgcccctggcaaatgcacacacctcatgctagcctcacgaaactggaataagccttcgaaaagaaattgtccttgaagcttgtatctgatatcagcactggattgtagaacttgttgctgattttgaccttgtattgaagttaactgttccccttggtatttgtttaataccctgtacatatctttgagttcaacctttagtacgtgtggcttggtcacttcgtggctaaggtaagaacgtgcttgtggaagacaagtctgtggcttggtgagtctgtgtggccagcagcctctgatctgtgcagggtattaacgtgtcagggctgagtgttctgggatttctctagaggctggcaagaaccagttgttttgtcttgcgggtctgtcagggttggaaagtccaagccgtaggacccagtttcctttcttagctgatgtctttggccagaacaccgtgggctgttacttgctttgagttggaagcggtttgcatttacgcctgtaaatgtattcattcttaatttatgtaaggttttttttgtacgcaattctcgattctttgaagagatgacaacaaattttggttttctactgttatgtgagaacattaggccccagcaacacgtcattgtgtaaggaaaaataaaagtgctgccgtaaccgtctcagtcgccgctgccagctctcgcactctgttcttccgccgctccgccgtcgcgtttctctgccggtcgcaatggaagaagagatcgccgcgctggtcattgacaatggctccggcatgtgcaaagctggttttgctggggacgacgctccccgagccgtgtttccttccatcgtcgggcgccccagacaccagggcgtcatggtgggcatgggccagaaggactcctacgtgggcgacgaggcccagagcaagcgtggcatcctgaccctgaagtaccccattgagcatggcatcgtcaccaactgggacgacatggagaagatctggcaccacaccttctacaacgagctgcgcgtggccccggaggagcacccagtgctgctgaccgaggcccccctgaaccccaaggccaacagagagaagatgactcagattatgtttgagaccttcaacaccccggccatgtacgtggccatccaggccgtgctgtccctctacgcctctgggcgcaccactggcattgtcatggactctggagacggggtcacccacacggtgcccatctacgagggctacgccctcccccacgccatcctgcgtctggacctggctggccgggacctgaccgactacctcatgaagatcctcactgagcgaggctacagcttcaccaccacggccgagcgggaaatcgtgcgcgacatcaaggagaagctgtgctacgtcgccctggacttcgagcaggagatggccaccgccgcatcctcctcttctctggagaagagctacgagctgcccgatggccaggtcatcaccattggcaatgagcggttccggtgtccggaggcgctgttccagccttccttcctgggtatggaatcttgcggcatccacgagaccaccttcaactccatcatgaagtgtgacgtggacatccgcaaagacctgtacgccaacacggtgctgtcgggcggcaccaccatgtacccgggcattgccgacaggatgcagaaggagatcaccgccctggcgcccagcaccatgaagatcaagatcatcgcacccccagagcgcaagtactcggtgtggatcggtggctccatcctggcctcactgtccaccttccagcagatgtggattagcaagcaggagtacgacgagtcgggcccctccatcgtccaccgcaaatgcttctaaacggactcagcagatgcgtagcatttgctgcatgggttaattgagaatagaaatttgcccctggcaaatgcacacacctcatgctagcctcacgaaactggaataagccttcgaaaagaaattgtccttgaagcttgtatctgatatcagcactggattgtagaacttgttgctgattttgaccttgtattgaagttaactgttccccttggtatttgtttaataccctgtacatatctttgagttcaacctttagtacgtgtggcttggtcacttcgtggctaaggtaagaacgtgcttgtggaagacaagtctgtggcttggtgagtctgtgtggccagcagcctctgatctgtgcagggtattaacgtgtcagggctgagtgttctgggatttctctagaggctggcaagaaccagttgttttgtcttgcgggtctgtcagggttggaaagtccaagccgtaggacccagtttcctttcttagctgatgtctttggccagaacaccgtgggctgttacttgctttgagttggaagcggtttgcatttacgcctgtaaatgtattcattcttaatttatgtaaggttttttttgtacgcaattctcgattctttgaagagatgacaacaaattttggttttctactgttatgtgagaacattaggccccagcaacacgtcattgtgtaaggaaaaataaaagtgctgccgtaacc

SEQ ID NO: 795 - DNA, 2066 bp, Homo sapiens
  misc_feature (355)..(355): second gene starts at position 355
gtacttgcgcagaactcccctcgcggcgaccacgcactacgggttggcgccagagtcaaaaggcgtcggccctctggcaagatggctgctgcggaggcgttggagcgcggaaatctggaaccgggatggcgacgtctacactgagtcggaggcgaaggagcttactccacgggaacagcctctagataatctgagttgttgaaaatacgaagcctgttactcgtgaacagtggctgacaacagtgttgttgtgagcctggctgtctgcttggacccagaggtttcgtctgccagggtttttggttgtatttaggatttcagggaaaagtgtccaagctttcagtgttggagcagcagtgggagacatttagtgaacgctcttcaagctcacaaactctgacccaatttgattctaacattgcaccagctgatcctgatactgctattgttcatccagttcccattcgtatgactccaagcaaaatccacatgcaggaaatggaacttaaaagaactggcagcgatcatacaaatcccactagcccattacttgtgaaaccatctgaccttttagaagaaaataagataaattcatcggtgaaattcgcttctggtaatactgtagatggttacagtagttcagactcttttacttctgacccagaacagatcgggagcaatgtaactcgtcaaaggtctcattcaggaacgtcgcctgataacactgcaccaccacctccccctccaaggccacagccctctcattctagatcatcatctttagatatgaatcggacctttacagtcaccacaggacaacaacaggctggagttgttgcccatcctcctgcagtgcctccaagaccacagccctcacaggctcctggtcctgctgtgcatcgcccagtggatgccgatggcctcataactcacactagtacctcacctcagcagataccagagcaaccaaattttgcagatttcagtcagtttgaagtatttgctgcatcaaatgtaaacgacgaacaagatgatgaagccgagaaacatccagaagtcctgccggctgaaaaagcttctgatcctgcaagttctcttcgagttgccaaaacagatagtaaaactgaagaaaagacagctgctagtgctcctgccaatgtgagcaaaggcacaacaccacttgctccaccacctaaacctgttcgaagaagattaaaatcagaagatgaattaaggccagaagttgatgaacatacacaaaagacgggtgtcttagctgctgttcttgcatcacaaccttctattcccagatctgttgggaaagataagaaagctattcaggcatcaattagacgtaataaggaaaccaacaccgttttggccagattgaatagcgaattgcagcaacaattaaaggatgttcttgaggagagaatttccctggaagttcaactggaacaacttcgaccattctctcacctataagccaattgccgttaactgtgaacatacttgtttttaagtggttttgggttcaaagccaatttggagacctagacattcagctcactgcttaactcaacattaaattttatgattctgttttgccctatatgttcaccgttgtatttaagtatcttttattttttaatttcgacaataaaaaggtcaggatggcgttttctggagggtagattgtgtttgttggcacacccaccttttctgttccctagcatctgggatatgcaatgcttctatggctaataccacacaccaatttaatttatagaatgggctcctcatttacatctcagtcacagactcagaaataaattgtcagtttgtccttttatgtttaatattttacataaagcatctattctataaaaatctttagaaagagtttcccatttaattttgattttaaagaattatattggataaggtggttttcaccataagctaatttactctctgcagccgtctacattcttcacaaatcatgtggtacattgaagcctcttttacatgtcaacttgtgacaaatacaaacatgtgagatttta

SEQ ID NO: 796 - DNA, 435 bp, Homo sapiens
  misc_feature (355)..(355): second gene starts at position 355
gtacttgcgcagaactcccctcgcggcgaccacgcactacgggttggcgccagagtcaaaaggcgtcggccctctggcaagatggctgctgcggaggcgttggagcgcggaaatctggaaccgggatggcgacgtctacactgagtcggaggcgaaggagcttactccacgggaacagcctctagataatctgagttgttgaaaatacgaagcctgttactcgtgaacagtggctgacaacagtgttgttgtgagcctggctgtctgcttggacccagaggtttcgtctgccagggtttttggttgtatttaggatttcagggaaaagtgtccaagctttcagtgttggagcagtacattcttcacaaatcatgtggtacattgaagcctcttttacatgtcaacttgtgacaaatacaaacatgtgagatttta

SEQ ID NO: 797 - DNA, 2022 bp, Homo sapiens
  misc_feature (311)..(311): second gene starts at position 311
ctcgtcctccgcccgccgcgcgggggcgccgctctagccccgcgccatctcggtggccgtccgcccactccgcggcgttcggggaaatggctgcgagaccctagaggcctgcggagcttactccacgggaacagcctctagataatctgagttgttgaaaatacgaagcctgttactcgtgaacagtggctgacaacagtgttgttgtgagcctggctgtctgcttggacccagaggtttcgtctgccagggtttttggttgtatttaggatttcagggaaaagtgtccaagctttcagtgttggagcagcagtgggagacatttagtgaacgctcttcaagctcacaaactctgacccaatttgattctaacattgcaccagctgatcctgatactgctattgttcatccagttcccattcgtatgactccaagcaaaatccacatgcaggaaatggaacttaaaagaactggcagcgatcatacaaatcccactagcccattacttgtgaaaccatctgaccttttagaagaaaataagataaattcatcggtgaaattcgcttctggtaatactgtagatggttacagtagttcagactcttttacttctgacccagaacagatcgggagcaatgtaactcgtcaaaggtctcattcaggaacgtcgcctgataacactgcaccaccacctccccctccaaggccacagccctctcattctagatcatcatctttagatatgaatcggacctttacagtcaccacaggacaacaacaggctggagttgttgcccatcctcctgcagtgcctccaagaccacagccctcacaggctcctggtcctgctgtgcatcgcccagtggatgccgatggcctcataactcacactagtacctcacctcagcagataccagagcaaccaaattttgcagatttcagtcagtttgaagtatttgctgcatcaaatgtaaacgacgaacaagatgatgaagccgagaaacatccagaagtcctgccggctgaaaaagcttctgatcctgcaagttctcttcgagttgccaaaacagatagtaaaactgaagaaaagacagctgctagtgctcctgccaatgtgagcaaaggcacaacaccacttgctccaccacctaaacctgttcgaagaagattaaaatcagaagatgaattaaggccagaagttgatgaacatacacaaaagacgggtgtcttagctgctgttcttgcatcacaaccttctattcccagatctgttgggaaagataagaaagctattcaggcatcaattagacgtaataaggaaaccaacaccgttttggccagattgaatagcgaattgcagcaacaattaaaggatgttcttgaggagagaatttccctggaagttcaactggaacaacttcgaccattctctcacctataagccaattgccgttaactgtgaacatacttgtttttaagtggttttgggttcaaagccaatttggagacctagacattcagctcactgcttaactcaacattaaattttatgattctgttttgccctatatgttcaccgttgtatttaagtatcttttattttttaatttcgacaataaaaaggtcaggatggcgttttctggagggtagattgtgtttgttggcacacccaccttttctgttccctagcatctgggatatgcaatgcttctatggctaataccacacaccaatttaatttatagaatgggctcctcatttacatctcagtcacagactcagaaataaattgtcagtttgtccttttatgtttaatattttacataaagcatctattctataaaaatctttagaaagagtttcccatttaattttgattttaaagaattatattggataaggtggttttcaccataagctaatttactctctgcagccgtctacattcttcacaaatcatgtggtacattgaagcctcttttacatgtcaacttgtgacaaatacaaacatgtgagatttta

SEQ ID NO: 798 - DNA, 391 bp, Homo sapiens
  misc_feature (311)..(311): second gene starts at position 311
ctcgtcctccgcccgccgcgcgggggcgccgctctagccccgcgccatctcggtggccgtccgcccactccgcggcgttcggggaaatggctgcgagaccctagaggcctgcggagcttactccacgggaacagcctctagataatctgagttgttgaaaatacgaagcctgttactcgtgaacagtggctgacaacagtgttgttgtgagcctggctgtctgcttggacccagaggtttcgtctgccagggtttttggttgtatttaggatttcagggaaaagtgtccaagctttcagtgttggagcagtacattcttcacaaatcatgtggtacattgaagcctcttttacatgtcaacttgtgacaaatacaaacatgtgagatttta

SEQ ID NO: 799 - DNA, 2022 bp, Homo sapiens; identical to SEQ ID NO: 797
  misc_feature (311)..(311): second gene starts at position 311

SEQ ID NO: 800 - DNA, 391 bp, Homo sapiens; identical to SEQ ID NO: 798
  misc_feature (311)..(311): second gene starts at position 311

SEQ ID NO: 801 - DNA, 2066 bp, Homo sapiens; identical to SEQ ID NO: 795
  misc_feature (355)..(355): second gene starts at position 355

SEQ ID NO: 802 - DNA, 435 bp, Homo sapiens; identical to SEQ ID NO: 796
  misc_feature (355)..(355): second gene starts at position 355

SEQ ID NO: 803 - DNA, 2029 bp, Homo sapiens
  misc_feature (318)..(318): second gene starts at position 318
ctcgtcctccgcccgccgcgcgggggcgccgctctagccccgcgccatctcggtggccgtccgcccactccgcggcgttcggggaaatggctgcgagaccctagaggcctgcggcctgcggagcttactccacgggaacagcctctagataatctgagttgttgaaaatacgaagcctgttactcgtgaacagtggctgacaacagtgttgttgtgagcctggctgtctgcttggacccagaggtttcgtctgccagggtttttggttgtatttaggatttcagggaaaagtgtccaagctttcagtgttggagcagcagtgggagacatttagtgaacgctcttcaagctcacaaactctgacccaatttgattctaacattgcaccagctgatcctgatactgctattgttcatccagttcccattcgtatgactccaagcaaaatccacatgcaggaaatggaacttaaaagaactggcagcgatcatacaaatcccactagcccattacttgtgaaaccatctgaccttttagaagaaaataagataaattcatcggtgaaattcgcttctggtaatactgtagatggttacagtagttcagactcttttacttctgacccagaacagatcgggagcaatgtaactcgtcaaaggtctcattcaggaacgtcgcctgataacactgcaccaccacctccccctccaaggccacagccctctcattctagatcatcatctttagatatgaatcggacctttacagtcaccacaggacaacaacaggctggagttgttgcccatcctcctgcagtgcctccaagaccacagccctcacaggctcctggtcctgctgtgcatcgcccagtggatgccgatggcctcataactcacactagtacctcacctcagcagataccagagcaaccaaattttgcagatttcagtcagtttgaagtatttgctgcatcaaatgtaaacgacgaacaagatgatgaagccgagaaacatccagaagtcctgccggctgaaaaagcttctgatcctgcaagttctcttcgagttgccaaaacagatagtaaaactgaagaaaagacagctgctagtgctcctgccaatgtgagcaaaggcacaacaccacttgctccaccacctaaacctgttcgaagaagattaaaatcagaagatgaattaaggccagaagttgatgaacatacacaaaagacgggtgtcttagctgctgttcttgcatcacaaccttctattcccagatctgttgggaaagataagaaagctattcaggcatcaattagacgtaataaggaaaccaacaccgttttggccagattgaatagcgaattgcagcaacaattaaaggatgttcttgaggagagaatttccctggaagttcaactggaacaacttcgaccattctctcacctataagccaattgccgttaactgtgaacatacttgtttttaagtggttttgggttcaaagccaatttggagacctagacattcagctcactgcttaactcaacattaaattttatgattctgttttgccctatatgttcaccgttgtatttaagtatcttttattttttaatttcgacaataaaaaggtcaggatggcgttttctggagggtagattgtgtttgttggcacacccaccttttctgttccctagcatctgggatatgcaatgcttctatggctaataccacacaccaatttaatttatagaatgggctcctcatttacatctcagtcacagactcagaaataaattgtcagtttgtccttttatgtttaatattttacataaagcatctattctataaaaatctttagaaagagtttcccatttaattttgattttaaagaattatattggataaggtggttttcaccataagctaatttactctctgcagccgtctacattcttcacaaatcatgtggtacattgaagcctcttttacatgtcaacttgtgacaaatacaaacatgtgagatttta

SEQ ID NO: 804 - DNA, 398 bp, Homo sapiens
  misc_feature (318)..(318): second gene starts at position 318
ctcgtcctccgcccgccgcgcgggggcgccgctctagccccgcgccatctcggtggccgtccgcccactccgcggcgttcggggaaatggctgcgagaccctagaggcctgcggcctgcggagcttactccacgggaacagcctctagataatctgagttgttgaaaatacgaagcctgttactcgtgaacagtggctgacaacagtgttgttgtgagcctggctgtctgcttggacccagaggtttcgtctgccagggtttttggttgtatttaggatttcagggaaaagtgtccaagctttcagtgttggagcagtacattcttcacaaatcatgtggtacattgaagcctcttttacatgtcaacttgtgacaaatacaaacatgtgagatttta

SEQ ID NO: 805 - DNA, 2066 bp, Homo sapiens; identical to SEQ ID NO: 795
  misc_feature (355)..(355): second gene starts at position 355

SEQ ID NO: 806 - DNA, 435 bp, Homo sapiens; identical to SEQ ID NO: 796
  misc_feature (355)..(355): second gene starts at position 355

SEQ ID NO: 807 - DNA, 1985 bp, Homo sapiens
  misc_feature (355)..(355): second gene starts at position 355
gtacttgcgcagaactcccctcgcggcgaccacgcactacgggttggcgccagagtcaaaaggcgtcggccctctggcaagatggctgctgcggaggcgttggagcgcggaaatctggaaccgggatggcgacgtctacactgagtcggaggcgaaggagcttactccacgggaacagcctctagataatctgagttgttgaaaatacgaagcctgttactcgtgaacagtggctgacaacagtgttgttgtgagcctggctgtctgcttggacccagaggtttcgtctgccagggtttttggttgtatttaggatttcagggaaaagtgtccaagctttcagtgttggagcaggatactgctattgttcatccagttcccattcgtatgactccaagcaaaatccacatgcaggaaatggaacttaaaagaactggcagcgatcatacaaatcccactagcccattacttgtgaaaccatctgaccttttagaagaaaataagataaattcatcggtgaaattcgcttctggtaatactgtagatggttacagtagttcagactcttttacttctgacccagaacagatcgggagcaatgtaactcgtcaaaggtctcattcaggaacgtcgcctgataacactgcaccaccacctccccctccaaggccacagccctctcattctagatcatcatctttagatatgaatcggacctttacagtcaccacaggacaacaacaggctggagttgttgcccatcctcctgcagtgcctccaagaccacagccctcacaggctcctggtcctgctgtgcatcgcccagtggatgccgatggcctcataactcacactagtacctcacctcagcagataccagagcaaccaaattttgcagatttcagtcagtttgaagtatttgctgcatcaaatgtaaacgacgaacaagatgatgaagccgagaaacatccagaagtcctgccggctgaaaaagcttctgatcctgcaagttctcttcgagttgccaaaacagatagtaaaactgaagaaaagacagctgctagtgctcctgccaatgtgagcaaaggcacaacaccacttgctccaccacctaaacctgttcgaagaagattaaaatcagaagatgaattaaggccagaagttgatgaacatacacaaaagacgggtgtcttagctgctgttcttgcatcacaaccttctattcccagatctgttgggaaagataagaaagctattcaggcatcaattagacgtaataaggaaaccaacaccgttttggccagattgaatagcgaattgcagcaacaattaaaggatgttcttgaggagagaatttccctggaagttcaactggaacaacttcgaccattctctcacctataagccaattgccgttaactgtgaacatacttgtttttaagtggttttgggttcaaagccaatttggagacctagacattcagctcactgcttaactcaacattaaattttatgattctgttttgccctatatgttcaccgttgtatttaagtatcttttattttttaatttcgacaataaaaaggtcaggatggcgttttctggagggtagattgtgtttgttggcacacccaccttttctgttccctagcatctgggatatgcaatgcttctatggctaataccacacaccaatttaatttatagaatgggctcctcatttacatctcagtcacagactcagaaataaattgtcagtttgtccttttatgtttaatattttacataaagcatctattctataaaaatctttagaaagagtttcccatttaattttgattttaaagaattatattggataaggtggttttcaccataagctaatttactctctgcagccgtctacattcttcacaaatcatgtggtacattgaagcctcttttacatgtcaacttgtgacaaatacaaacatgtgagatttta

SEQ ID NO: 808 - DNA, 1988 bp, Homo sapiens
  misc_feature (355)..(355): second gene starts at position 355
gtacttgcgcagaactcccctcgcggcgaccacgcactacgggttggcgccagagtcaaaaggcgtcggccctctggcaagatggctgctgcggaggcgttggagcgcggaaatctggaaccgggatggcgacgtctacactgagtcggaggcgaaggagcttactccacgggaacagcctctagataatctgagttgttgaaaatacgaagcctgttactcgtgaacagtggctgacaacagtgttgttgtgagcctggctgtctgcttggacccagaggtttcgtctgccagggtttttggttgtatttaggatttcagggaaaagtgtccaagctttcagtgttggagcaggatactgctattgttcatccagttcccattcgtatgactccaagcaaaatccacatgcaggaaatggaacttaaaagaactggcagcgatcatacaaatcccactagcccattacttgtgaaaccatctgaccttttagaagaaaataagataaattcatcggtgaaattcgcttctggtaatactgtagcagatggttacagtagttcagactcttttacttctgacccagaacagatcgggagcaatgtaactcgtcaaaggtctcattcaggaacgtcgcctgataacactgcaccaccacctccccctccaaggccacagccctctcattctagatcatcatctttagatatgaatcggacctttacagtcaccacaggacaacaacaggctggagttgttgcccatcctcctgcagtgcctccaagaccacagccctcacaggctcctggtcctgctgtgcatcgcccagtggatgccgatggcctcataactcacactagtacctcacctcagcagataccagagcaaccaaattttgcagatttcagtcagtttgaagtatttgctgcatcaaatgtaaacgacgaacaagatgatgaagccgagaaacatccagaagtcctgccggctgaaaaagcttctgatcctgcaagttctcttcgagttgccaaaacagatagtaaaactgaagaaaagacagctgctagtgctcctgccaatgtgagcaaaggcacaacaccacttgctccaccacctaaacctgttcgaagaagattaaaatcagaagatgaattaaggccagaagttgatgaacatacacaaaagacgggtgtcttagctgctgttcttgcatcacaaccttctattcccagatctgttgggaaagataagaaagctattcaggcatcaattagacgtaataaggaaaccaacaccgttttggccagattgaatagcgaattgcagcaacaattaaaggatgttcttgaggagagaatttccctggaagttcaactggaacaacttcgaccattctctcacctataagccaattgccgttaactgtgaacatacttgtttttaagtggttttgggttcaaagccaatttggagacctagacattcagctcactgcttaactcaacattaaattttatgattctgttttgccctatatgttcaccgttgtatttaagtatcttttattttttaatttcgacaataaaaaggtcaggatggcgttttctggagggtagattgtgtttgttggcacacccaccttttctgttccctagcatctgggatatgcaatgcttctatggctaataccacacaccaatttaatttatagaatgggctcctcatttacatctcagtcacagactcagaaataaattgtcagtttgtccttttatgtttaatattttacataaagcatctattctataaaaatctttagaaagagtttcccatttaattttgattttaaagaattatattggataaggtggttttcaccataagctaatttactctctgcagccgtctacattcttcacaaatcatgtggtacattgaagcctcttttacatgtcaacttgtgacaaatacaaacatgtgagatttta

SEQ ID NO: 809 - DNA, 1941 bp, Homo sapiens
  misc_feature (311)..(311): second gene starts at position 311
ctcgtcctccgcccgccgcgcgggggcgccgctctagccccgcgccatctcggtggccgtccgcccactccgcggcgttcggggaaatggctgcgagaccctagaggcctgcggagcttactccacgggaacagcctctagataatctgagttgttgaaaatacgaagcctgttactcgtgaacagtggctgacaacagtgttgttgtgagcctggctgtctgcttggacccagaggtttcgtctgccagggtttttggttgtatttaggatttcagggaaaagtgtccaagctttcagtgttggagcaggatactgctattgttcatccagttcccattcgtatgactccaagcaaaatccacatgcaggaaatggaacttaaaagaactggcagcgatcatacaaatcccactagcccattacttgtgaaaccatctgaccttttagaagaaaataagataaattcatcggtgaaattcgcttctggtaatactgtagatggttacagtagttcagactcttttacttctgacccagaacagatcgggagcaatgtaactcgtcaaaggtctcattcaggaacgtcgcctgataacactgcaccaccacctccccctccaaggccacagccctctcattctagatcatcatctttagatatgaatcggacctttacagtcaccacaggacaacaacaggctggagttgttgcccatcctcctgcagtgcctccaagaccacagccctcacaggctcctggtcctgctgtgcatcgcccagtggatgccgatggcctcataactcacactagtacctcacctcagcagataccagagcaaccaaattttgcagatttcagtcagtttgaagtatttgctgcatcaaatgtaaacgacgaacaagatgatgaagccgagaaacatccagaagtcctgccggctgaaaaagcttctgatcctgcaagttctcttcgagttgccaaaacagatagtaaaactgaagaaaagacagctgctagtgctcctgccaatgtgagcaaaggcacaacaccacttgctccaccacctaaacctgttcgaagaagattaaaatcagaagatgaattaaggccagaagttgatgaacatacacaaaagacgggtgtcttagctgctgttcttgcatcacaaccttctattcccagatctgttgggaaagataagaaagctattcaggcatcaattagacgtaataaggaaaccaacaccgttttggccagattgaatagcgaattgcagcaacaattaaaggatgttcttgaggagagaatttccctggaagttcaactggaacaacttcgaccattctctcacctataagccaattgccgttaactgtgaacatacttgtttttaagtggttttgggttcaaagccaatttggagacctagacattcagctcactgcttaactcaacattaaattttatgattctgttttgccctatatgttcaccgttgtatttaagtatcttttattttttaatttcgacaataaaaaggtcaggatggcgttttctggagggtagattgtgtttgttggcacacccaccttttctgttccctagcatctgggatatgcaatgcttctatggctaataccacacaccaatttaatttatagaatgggctcctcatttacatctcagtcacagactcagaaataaattgtcagtttgtccttttatgtttaatattttacataaagcatctattctataaaaatctttagaaagagtttcccatttaattttgattttaaagaattatattggataaggtggttttcaccataagctaatttactctctgcagccgtctacattcttcacaaatcatgtggtacattgaagcctcttttacatgtcaacttgtgacaaatacaaacatgtgagatttta

SEQ ID NO: 810 - DNA, 1944 bp, Homo sapiens
  misc_feature (311)..(311): second gene starts at position 311
ctcgtcctccgcccgccgcgcgggggcgccgctctagccccgcgccatctcggtggccgtccgcccactccgcggcgttcggggaaatggctgcgagaccctagaggcctgcggagcttactccacgggaacagcctctagataatctgagttgttgaaaatacgaagcctgttactcgtgaacagtggctgacaacagtgttgttgtgagcctggctgtctgcttggacccagaggtttcgtctgccagggtttttggttgtatttaggatttcagggaaaagtgtccaagctttcagtgttggagcaggatactgctattgttcatccagttcccattcgtatgactccaagcaaaatccacatgcaggaaatggaacttaaaagaactggcagcgatcatacaaatcccactagcccattacttgtgaaaccatctgaccttttagaagaaaataagataaattcatcggtgaaattcgcttctggtaatactgtagcagatggttacagtagttcagactcttttacttctgacccagaacagatcgggagcaatgtaactcgtcaaaggtctcattcaggaacgtcgcctgataacactgcaccaccacctccccctccaaggccacagccctctcattctagatcatcatctttagatatgaatcggacctttacagtcaccacaggacaacaacaggctggagttgttgcccatcctcctgcagtgcctccaagaccacagccctcacaggctcctggtcctgctgtgcatcgcccagtggatgccgatggcctcataactcacactagtacctcacctcagcagataccagagcaaccaaattttgcagatttcagtcagtttgaagtatttgctgcatcaaatgtaaacgacgaacaagatgatgaagccgagaaacatccagaagtcctgccggctgaaaaagcttctgatcctgcaagttctcttcgagttgccaaaacagatagtaaaactgaagaaaagacagctgctagtgctcctgccaatgtgagcaaaggcacaacaccacttgctccaccacctaaacctgttcgaagaagattaaaatcagaagatgaattaaggccagaagttgatgaacatacacaaaagacgggtgtcttagctgctgttcttgcatcacaaccttctattcccagatctgttgggaaagataagaaagctattcaggcatcaattagacgtaataaggaaaccaacaccgttttggccagattgaatagcgaattgcagcaacaattaaaggatgttcttgaggagagaatttccctggaagttcaactggaacaacttcgaccattctctcacctataagccaattgccgttaactgtgaacatacttgtttttaagtggttttgggttcaaagccaatttggagacctagacattcagctcactgcttaactcaacattaaattttatgattctgttttgccctatatgttcaccgttgtatttaagtatcttttattttttaatttcgacaataaaaaggtcaggatggcgttttctggagggtagattgtgtttgttggcacacccaccttttctgttccctagcatctgggatatgcaatgcttctatggctaataccacacaccaatttaatttatagaatgggctcctcatttacatctcagtcacagactcagaaataaattgtcagtttgtccttttatgtttaatattttacataaagcatctattctataaaaatctttagaaagagtttcccatttaattttgattttaaagaattatattggataaggtggttttcaccataagctaatttactctctgcagccgtctacattcttcacaaatcatgtggtacattgaagcctcttttacatgtcaacttgtgacaaatacaaacatgtgagatttta

SEQ ID NO: 811 - DNA, 1941 bp, Homo sapiens; identical to SEQ ID NO: 809
  misc_feature (311)..(311): second gene starts at position 311

SEQ ID NO: 812 - DNA, 1944 bp, Homo sapiens; identical to SEQ ID NO: 810
  misc_feature (311)..(311): second gene starts at position 311

SEQ ID NO: 813 - DNA, 1985 bp, Homo sapiens; identical to SEQ ID NO: 807
  misc_feature (355)..(355): second gene starts at position 355

SEQ ID NO: 814 - DNA, 1988 bp, Homo sapiens; identical to SEQ ID NO: 808
  misc_feature (355)..(355): second gene starts at position 355

SEQ ID NO: 815 - DNA, 1948 bp, Homo sapiens
  misc_feature (318)..(318): second gene starts at position 318
ctcgtcctccgcccgccgcgcgggggcgccgctctagccccgcgccatctcggtggccgtccgcccactccgcggcgttcggggaaatggctgcgagaccctagaggcctgcggcctgcggagcttactccacgggaacagcctctagataatctgagttgttgaaaatacgaagcctgttactcgtgaacagtggctgacaacagtgttgttgtgagcctggctgtctgcttggacccagaggtttcgtctgccagggtttttggttgtatttaggatttcagggaaaagtgtccaagctttcagtgttggagcaggatactgctattgttcatccagttcccattcgtatgactccaagcaaaatccacatgcaggaaatggaacttaaaagaactggcagcgatcatacaaatcccactagcccattacttgtgaaaccatctgaccttttagaagaaaataagataaattcatcggtgaaattcgcttctggtaatactgtagatggttacagtagttcagactcttttacttctgacccagaacagatcgggagcaatgtaactcgtcaaaggtctcattcaggaacgtcgcctgataacactgcaccaccacctccccctccaaggccacagccctctcattctagatcatcatctttagatatgaatcggacctttacagtcaccacaggacaacaacaggctggagttgttgcccatcctcctgcagtgcctccaagaccacagccctcacaggctcctggtcctgctgtgcatcgcccagtggatgccgatggcctcataactcacactagtacctcacctcagcagataccagagcaaccaaattttgcagatttcagtcagtttgaagtatttgctgcatcaaatgtaaacgacgaacaagatgatgaagccgagaaacatccagaagtcctgccggctgaaaaagcttctgatcctgcaagttctcttcgagttgccaaaacagatagtaaaactgaagaaaagacagctgctagtgctcctgccaatgtgagcaaaggcacaacaccacttgctccaccacctaaacctgttcgaagaagattaaaatcagaagatgaattaaggccagaagttgatgaacatacacaaaagacgggtgtcttagctgctgttcttgcatcacaaccttctattcccagatctgttgggaaagataagaaagctattcaggcatcaattagacgtaataaggaaaccaacaccgttttggccagattgaatagcgaattgcagcaacaattaaaggatgttcttgaggagagaatttccctggaagttcaactggaacaacttcgaccattctctcacctataagccaattgccgttaactgtgaacatacttgtttttaagtggttttgggttcaaagccaatttggagacctagacattcagctcactgcttaactcaacattaaattttatgattctgttttgccctatatgttcaccgttgtatttaagtatcttttattttttaatttcgacaataaaaaggtcaggatggcgttttctggagggtagattgtgtttgttggcacacccaccttttctgttccctagcatctgggatatgcaatgcttctatggctaataccacacaccaatttaatttatagaatgggctcctcatttacatctcagtcacagactcagaaataaattgtcagtttgtccttttatgtttaatattttacataaagcatctattctataaaaatctttagaaagagtttcccatttaattttgattttaaagaattatattggataaggtggttttcaccataagctaatttactctctgcagccgtctacattcttcacaaatcatgtggtacattgaagcctcttttacatgtcaacttgtgacaaatacaaacatgtgagatttta

SEQ ID NO: 816 - DNA, 1951 bp, Homo sapiens
  misc_feature (318)..(318): second gene starts at position 318
ctcgtcctccgcccgccgcgcgggggcgccgctctagccccgcgccatctcggtggccgtccgcccactccgcggcgttcggggaaatggctgcgagaccctagaggcctgcggcctgcggagcttactccacgggaacagcctctagataatctgagttgttgaaaatacgaagcctgttactcgtgaacagtggctgacaacagtgttgttgtgagcctggctgtctgcttggacccagaggtttcgtctgccagggtttttggttgtatttaggatttcagggaaaagtgtccaagctttcagtgttggagcaggatactgctattgttcatccagttcccattcgtatgactccaagcaaaatccacatgcaggaaatggaacttaaaagaactggcagcgatcatacaaatcccactagcccattacttgtgaaaccatctgaccttttagaagaaaataagataaattcatcggtgaaattcgcttctggtaatactgtagcagatggttacagtagttcagactcttttacttctgacccagaacagatcgggagcaatgtaactcgtcaaaggtctcattcaggaacgtcgcctgataacactgcaccaccacctccccctccaaggccacagccctctcattctagatcatcatctttagatatgaatcggacctttacagtcaccacaggacaacaacaggctggagttgttgcccatcctcctgcagtgcctccaagaccacagccctcacaggctcctggtcctgctgtgcatcgcccagtggatgccgatggcctcataactcacactagtacctcacctcagcagataccagagcaaccaaattttgcagatttcagtcagtttgaagtatttgctgcatcaaatgtaaacgacgaacaagatgatgaagccgagaaacatccagaagtcctgccggctgaaaaagcttctgatcctgcaagttctcttcgagttgccaaaacagatagtaaaactgaagaaaagacagctgctagtgctcctgccaatgtgagcaaaggcacaacaccacttgctccaccacctaaacctgttcgaagaagattaaaatcagaagatgaattaaggccagaagttgatgaacatacacaaaagacgggtgtcttagctgctgttcttgcatcacaaccttctattcccagatctgttgggaaagataagaaagctattcaggcatcaattagacgtaataaggaaaccaacaccgttttggccagattgaatagcgaattgcagcaacaattaaaggatgttcttgaggagagaatttccctggaagttcaactggaacaacttcgaccattctctcacctataagccaattgccgttaactgtgaacatacttgtttttaagtggttttgggttcaaagccaatttggagacctagacattcagctcactgcttaactcaacattaaattttatgattctgttttgccctatatgttcaccgttgtatttaagtatcttttattttttaatttcgacaataaaaaggtcaggatggcgttttctggagggtagattgtgtttgttggcacacccaccttttctgttccctagcatctgggatatgcaatgcttctatggctaataccacacaccaatttaatttatagaatgggctcctcatttacatctcagtcacagactcagaaataaattgtcagtttgtccttttatgtttaatattttacataaagcatctattctataaaaatctttagaaagagtttcccatttaattttgattttaaagaattatattggataaggtggttttcaccataagctaatttactctctgcagccgtctacattcttcacaaatcatgtggtacattgaagcctcttttacatgtcaacttgtgacaaatacaaacatgtgagatttta

SEQ ID NO: 817 - DNA, 1985 bp, Homo sapiens; identical to SEQ ID NO: 807
  misc_feature (355)..(355): second gene starts at position 355

SEQ ID NO: 818 - DNA, 1988 bp, Homo sapiens; identical to SEQ ID NO: 808
  misc_feature (355)..(355): second gene starts at position 355

SEQ ID NO: 819 - DNA, 32767 bp, Homo sapiens
gtaaaggactggggccccgcaactggcctctcctgccctcttaagcgcagcgccattttagcaacgcagaagcccggcgccgggaagcctcagctcgcctgaaggcaggtcccctctgacgcctccgggagcccaggtttcccagagtccttgggacgcagcgacgagttgtgctgctatcttagctgtccttataggctggccattccaggtggtggtatttagataaaaccactcaaactctgcagtttggtcttggggtttggaggaaagcttttatttttcttcctgctccggttcagaaggtctgaagctcatacctaaccaggcataacacagaatctgcaaaacaaaaacccctaaaaaagcagacccagagcagtgtaaacacttctgggtgtgtccctgactggctgcccaaggtctctgtgtcttcggagacaaagccattcgcttagttggtctactttaaaaggccacttgaactcgctttccatggcgatttgccttgtgagcactttcaggagagcctggaagctgaaaaacggtagaaaaatttccgtgcgggccgtggggggctggcggcaactggggggccgcagatcagagtgggccactggcagccaacggcccccggggctcaggcggggagcagctctgtggtgtgggattgaggcgttttccaagagtgggttttcacgtttctaagatttcccaagcagacagcccgtgctgctccgatttctcgaacaaaaaagcaaaacgtgtggctgtcttgggagcaagtcgcaggactgcaagcagttgggggagaaagtccgccattttgccacttctcaaccgtccctgcaaggctggggctcagttgcgtaatggaaagtaaagccctgaactatcacactttaatcttccttcaaaaggtggtaaactatacctactgtccctcaagagaacacaagaagtgctttaagaggtattttaaaagttccgggggttttgtgaggtgtttgatgacccgtttaaaatatgatttccatgtttcttttgtctaaagtttgcagctcaaatctttccacacgctagtaatttaagtatttctgcatgtgtagtttgcattcaagttccataagctgttaagaaaaatctagaaaagtaaaactagaacctatttttaaccgaagaactactttttgcctccctcacaaaggcggcggaaggtgatcgaattccggtgatgcgagttgttctccgtctataaatacgcctcgcccgagctgtgcggtaggcattgaggcagccagcgcaggggcttctgctgagggggcaggcggagcttgaggaaaccgcagataagtttttttctctttgaaagatagagattaatacaactacttaaaaaatatagtcaataggttactaagatattgcttagcgttaagtttttaacgtaattttaatagcttaagattttaagagaaaatatgaagacttagaagagtagcatgaggaaggaaaagataaaaggtttctaaaacatgacggaggttgagatgaagcttcttcatggagtaaaaaatgtatttaaaagaaaattgagagaaaggactacagagccccgaattaataccaatagaagggcaatgcttttagattaaaatgaaggtgacttaaacagcttaaagtttagtttaaaagttgtaggtgattaaaataatttgaaggcgatcttttaaaaagagattaaaccgaaggtgattaaaagaccttgaaatccatgacgcagggagaattgcgtcatttaaagcctagttaacgcatttactaaacgcagacgaaaatggaaagattaattgggagtggtaggatgaaacaatttggagaagatagaagtttgaagtggaaaactggaagacagaagtacgggaaggcgaagaaaagaatagagaagatagggaaattagaagataaaaacatacttttagaagaaaaaagataaatttaaacctgaaaagtaggaagcagaagaaaaaagacaagctaggaaacaaaaagctaagggcaaaatgtacaaacttagaagaaaattggaagatagaaacaagatagaaaatgaaaatattgtcaagagtttcagatagaaaatgaaaaacaagctaagacaagtattggagaagtatagaagatagaaaaatataaagccaaaaattggataaaatagcactgaaaaaatgaggaaattattggtaaccaatttattttaaaagcccatcaatttaatttctggtggtgcagaagttagaaggtaaagcttgagaagatgagggtgtttacgtagaccagaaccaatttagaagaatacttgaagctagaaggggaagttggttaaaaatcacatcaaaaagctactaaaaggactggtgtaatttaaaaaaaactaaggcagaaggcttttggaagagttagaagaatttggaaggccttaaatatagtagcttagtttgaaaaatgtgaaggactttcgtaacggaagtaattcaagatcaagagtaattaccaacttaatgtttttgcattggactttgagttaagattattttttaaatcctgaggactagcattaattgacagctgacccaggtgctacacagaagtggattcagtgaatctaggaagacagcagcagacaggattccaggaaccagtgtttgatgaagctaggactgaggagcaagcgagcaagcagcagttcgtggtgaagataggaaaagagtccaggagccagtgcgatttggtgaaggaagctaggaagaaggaaggagcgctaacgatttggtggtgaagctaggaaaaaggattccaggaaggagcgagtgcaatttggtgatgaaggtagcaggcggcttggcttggcaaccacacggaggaggcgagcaggcgttgtgcgtagaggatcctagaccagcatgccagtgtgccaaggccacagggaaagcgagtggttggtaaaaatccgtgaggtcggcaatatgttgtttttctggaacttacttatggtaaccttttatttattttctaatataatgggggagtttcgtactgaggtgtaaagggatttatatggggacgtaggccgatttccgggtgttgtaggtttctctttttcaggcttatactcatgaatcttgtctgaagcttttgagggcagactgccaagtcctggagaaatagtagatggcaagtttgtgggttttttttttttacacgaatttgaggaaaaccaaatgaatttgatagccaaattgagacaatttcagcaaatctgtaagcagtttgtatgtttagttggggtaatgaagtatttcagttttgtgaatagatgacctgtttttacttcctcaccctgaattcgttttgtaaatgtagagtttggatgtgtaactgaggcgggggggagttttcagtatttttttttgtgggggtgggggcaaaatatgttttcagttctttttcccttaggtctgtctagaatcctaaaggcaaatgactcaaggtgtaacagaaaacaagaaaatccaatatcaggataatcagaccaccacaggtttacagtttatagaaactagagcagttctcacgttgaggtctgtggaagagatgtccattggagaaatggctggtagttactcttttttccccccacccccttaatcagactttaaaagtgcttaaccccttaaacttgttattttttacttgaagcattttgggatggtcttaacagggaagagagagggtgggggagaaaatgtttttttctaagattttccacagatgctatagtactattgacaaactgggttagagaaggagtgtaccgctgtgctgttggcacgaacaccttcagggactggagctgcttttatccttggaagagtattcccagttgaagctgaaaagtacagcacagtgcagctttggttcatattcagtcatctcaggagaacttcagaagagcttgagtaggccaaatgttgaagttaagttttccaataatgtgacttcttaaaagttttattaaaggggaggggcaaatattggcaattagttggcagtggcctgttacggttgggattggtggggtgggtttaggtaattgtttagtttatgattgcagataaactcatgccagagaacttaaagtcttagaatggaaaaagtaaagaaatatcaacttccaagttggcaagtaactcccaatgatttagtttttttccccccagtttgaattgggaagctgggggaagttaaatatgagccactgggtgtaccagtgcattaatttgggcaaggaaagtgtcataatttgatactgtatctgttttccttcaaagtatagagcttttggggaaggaaagtattgaactgggggttggtctggcctactgggctgacattaactacaattatgggaaatgcaaaagttgtttggatatggtagtgtgtggttctcttttggaatttttttcaggtgatttaataataatttaaaactactatagaaactgcagagcaaaggaagtggcttaatgatcctgaagggatttcttctgatggtagcttttgtattatcaagtaagattctattttcagttgtgtgtaagcaagtttttttttagtgtaggagaaatacttttccattgtttaactgcaaaacaagatgttaaggtatgcttcaaaaattttgtaaattgtttattttaaacttatctgtttgtaaattgtaactgattaagaattgtgatagttcagcttgaatgtctcttagagggtgggcttttgttgatgagggaggggaaactttttttttttctatagacttttttcagataacatcttctgagtcataaccagcctggcagtatgatggcctagatgcagagaaaacagctccttggtgaattgataagtaaaggcagaaaagattatatgtcatacctccattggggaataagcataaccctgagattcttactactgatgagaacattatctgcatatgccaaaaaattttaagcaaatgaaagctaccaatttaaagttacggaatctaccattttaaagttaattgcttgtcaagctataaccacaaaaataatgaattgatgagaaatacaatgaagaggcaatgtccatctcaaaatactgcttttacaaaagcagaataaaagcgaaaagaaatgaaaatgttacactacattaatcctggaataaaagaagccgaaataaatgagagatgagttgggatcaagtggattgaggaggctgtgctgtgtgccaatgtttcgtttgcctcagacaggtatctcttcgttatcagaagagttgcttcatttcatctgggagcagaaaacagcaggcagctgttaacagataagtttaacttgcatctgcagtattgcatgttagggataagtgcttatttttaagagctgtggagttcttaaatatcaaccatggcactttctcctgaccccttccctaggggatttcaggattgagaaatttttccatcgagcctttttaaaattgtaggacttgttcctgtgggcttcagtgatgggatagtacacttcactcagaggcatttgcatctttaaataatttcttaaaagcctctaaagtgatcagtgccttgatgccaactaaggaaatttgtttagcattgaatctctgaaggctctatgaaaggaatagcatgatgtgctgttagaatcagatgttactgctaaaatttacatgttgtgatgtaaattgtgtagaaaaccattaaatcattcaaaataataaactatttttattagagaatgtatacttttagaaagctgtctccttatttaaataaaatagtgtttgtctgtagttcagtgttggggcaatcttgggggggattcttctctaatctttcagaaactttgtctgcgaacactctttaatggaccagatcaggatttgagcggaagaacgaatgtaactttaaggcaggaaagacaaattttattcttcataaagtgatgagcatataataattccaggcacatggcaatagaggccctctaaataaggaataaataacctcttagacaggtgggagattatgatcagagtaaaaggtaattacacattttatttccagaaagtcaggggtctataaattgacagtgattagagtaatactttttcacatttccaaagtttgcatgttaactttaaatgcttacaatcttagagtggtaggcaatgttttacactattgaccttatatagggaagggagggggtgcctgtggggttttaaagaattttcctttgcagaggcatttcatccttcatgaagccattcaggattttgaattgcatatgagtgcttggctcttccttctgttctagtgagtgtatgagaccttgcagtgagtttatcagcatactcaaaatttttttcctggaatttggagggatgggaggagggggtggggcttacttgttgtagctttttttttttttacagacttcacagagaatgcagttgtcttgacttcaggtctgtctgttctgttggcaagtaaatgcagtactgttctgatcccgctgctattagaatgcattgtgaaacgactggagtatgattaaaagttgtgttccccaatgcttggagtagtgattgttgaaggaaaaaatccagctgagtgataaaggctgagtgttgaggaaatttctgcagttttaagcagtcgtatttgtgattgaagctgagtacattttgctggtgtatttttaggtaaaatgctttttgttcatttctggtggtgggaggggactgaagcctttagtcttttccagatgcaaccttaaaatcagtgacaagaaacattccaaacaagcaacagtcttcaagaaattaaactggcaagtggaaatgtttaaacagttcagtgatctttagtgcattgtttatgtgtgggtttctctctcccctcccttggtcttaattcttacatgcaggaacactcagcagacacacgtatgcgaagggccagagaagccagacccagtaagaaaaaatagcctatttactttaaataaaccaaacattccattttaaatgtggggattgggaaccactagttctttcagatggtattcttcagactatagaaggagcttccagttgaattcaccagtggacaaaatgaggaaaacaggtgaacaagctttttctgtatttacatacaaagtcagatcagttatgggacaatagtattgaatagatttcagctttatgctggagtaactggcatgtgagcaaactgtgttggcgtgggggtggaggggtgaggtgggcgctaagcctttttttaagatttttcaggtacccctcactaaaggcaccgaaggcttaaagtaggacaaccatggagccttcctgtggcaggagagacaacaaagcgctattatcctaaggtcaagagaagtgtcagcctcacctgatttttattagtaatgaggacttgcctcaactccctctttctggagtgaagcatccgaaggaatgcttgaagtacccctgggcttctcttaacatttaagcaagctgtttttatagcagctcttaataataaagcccaaatctcaagcggtgcttgaaggggagggaaagggggaaagcgggcaaccacttttccctagcttttccagaagcctgttaaaagcaaggtctccccacaagcaacttctctgccacatcgccaccccgtgccttttgatctagcacagacccttcacccctcacctcgatgcagccagtagcttggatccttgtgggcatgatccataatcggtttcaaggtaacgatggtgtcgaggtctttggtgggttgaactatgttagaaaaggccattaatttgcctgcaaattgttaacagaagggtattaaaaccacagctaagtagctctattataatacttatccagtgactaaaaccaacttaaaccagtaagtggagaaataacatgttcaagaactgtaatgctgggtgggaacatgtaacttgtagactggagaagataggcatttgagtggctgagagggcttttgggtgggaatgcaaaaattctctgctaagactttttcaggtgaacataacagacttggccaagctagcatcttagcggaagctgatctccaatgctcttcagtagggtcatgaaggtttttcttttcctgagaaaacaacacgtattgttttctcaggttttgctttttggcctttttctagcttaaaaaaaaaaaaagcaaaagatgctggtggttggcactcctggtttccaggacggggttcaaatccctgcggcgtctttgctttgactactaatctgtcttcaggactctttctgtatttctccttttctctgcaggtgctagttcttggagttttggggaggtgggaggtaacagcacaatatctttgaactatatacatccttgatgtataatttgtcaggagcttgacttgattgtatattcatatttacacgagaacctaatataactgccttgtctttttcaggtaatagcctgcagctggtgttttgagaagccctactgctgaaaacttaacaattttgtgtaataaaaatggagaagctctgtaaaggactggggccccgcaactggcctctcctgccctcttaagcgcagcgccattttagcaacgcagaagcccggcgccgggaagcctcagctcgcctgaaggcaggtcccctctgacgcctccgggagcccaggtttcccagagtccttgggacgcagcgacgagttgtgctgctatcttagctgtccttataggctggccattccaggtggtggtatttagataaaaccactcaaactctgcagtttggtcttggggtttggaggaaagcttttatttttcttcctgctccggttcagaaggtctgaagctcatacctaaccaggcataacacagaatctgcaaaacaaaaacccctaaaaaagcagacccagagcagtgtaaacacttctgggtgtgtccctgactggctgcccaaggtctctgtgtcttcggagacaaagccattcgcttagttggtctactttaaaaggccacttgaactcgctttccatggcgatttgccttgtgagcactttcaggagagcctggaagctgaaaaacggtagaaaaatttccgtgcgggccgtggggggctggcggcaactggggggccgcagatcagagtgggccactggcagccaacggcccccggggctcaggcggggagcagctctgtggtgtgggattgaggcgttttccaagagtgggttttcacgtttctaagatttcccaagcagacagcccgtgctgctccgatttctcgaacaaaaaagcaaaacgtgtggctgtcttgggagcaagtcgcaggactgcaagcagttgggggagaaagtccgccattttgccacttctcaaccgtccctgcaaggctggggctcagttgcgtaatggaaagtaaagccctgaactatcacactttaatcttccttcaaaaggtggtaaactatacctactgtccctcaagagaacacaagaagtgctttaagaggtattttaaaagttccgggggttttgtgaggtgtttgatgacccgtttaaaatatgatttccatgtttcttttgtctaaagtttgcagctcaaatctttccacacgctagtaatttaagtatttctgcatgtgtagtttgcattcaagttccataagctgttaagaaaaatctagaaaagtaaaactagaacctatttttaaccgaagaactactttttgcctccctcacaaaggcggcggaaggtgatcgaattccggtgatgcgagttgttctccgtctataaatacgcctcgcccgagctgtgcggtaggcattgaggcagccagcgcaggggcttctgctgagggggcaggcggagcttgaggaaaccgcagataagtttttttctctttgaaagatagagattaatacaactacttaaaaaatatagtcaataggttactaagatattgcttagcgttaagtttttaacgtaattttaatagcttaagattttaagagaaaatatgaagacttagaagagtagcatgaggaaggaaaagataaaaggtttctaaaacatgacggaggttgagatgaagcttcttcatggagtaaaaaatgtatttaaaagaaaattgagagaaaggactacagagccccgaattaataccaatagaagggcaatgcttttagattaaaatgaaggtgacttaaacagcttaaagtttagtttaaaagttgtaggtgattaaaataatttgaaggcgatcttttaaaaagagattaaaccgaaggtgattaaaagaccttgaaatccatgacgcagggagaattgcgtcatttaaagcctagttaacgcatttactaaacgcagacgaaaatggaaagattaattgggagtggtaggatgaaacaatttggagaagatagaagtttgaagtggaaaactggaagacagaagtacgggaaggcgaagaaaagaatagagaagatagggaaattagaagataaaaacatacttttagaagaaaaaagataaatttaaacctgaaaagtaggaagcagaagaaaaaagacaagctaggaaacaaaaagctaagggcaaaatgtacaaacttagaagaaaattggaagatagaaacaagatagaaaatgaaaatattgtcaagagtttcagatagaaaatgaaaaacaagctaagacaagtattggagaagtatagaagatagaaaaatataaagccaaaaattggataaaatagcactgaaaaaatgaggaaattattggtaaccaatttattttaaaagcccatcaatttaatttctggtggtgcagaagttagaaggtaaagcttgagaagatgagggtgtttacgtagaccagaaccaatttagaagaatacttgaagctagaaggggaagttggttaaaaatcacatcaaaaagctactaaaaggactggtgtaatttaaaaaaaactaaggcagaaggcttttggaagagttagaagaatttggaaggccttaaatatagtagcttagtttgaaaaatgtgaaggactttcgtaacggaagtaattcaagatcaagagtaattaccaacttaatgtttttgcattggactttgagttaagattattttttaaatcctgaggactagcattaattgacagctgacccaggtgctacacagaagtggattcagtgaatctaggaagacagcagcagacaggattccaggaaccagtgtttgatgaagctaggactgaggagcaagcgagcaagcagcagttcgtggtgaagataggaaaagagtccaggagccagtgcgatttggtgaaggaagctaggaagaaggaaggagcgctaacgatttggtggtgaagctaggaaaaaggattccaggaaggagcgagtgcaatttggtgatgaaggtagcaggcggcttggcttggcaaccacacggaggaggcgagcaggcgttgtgcgtagaggatcctagaccagcatgccagtgtgccaaggccacagggaaagcgagtggttggtaaaaatccgtgaggtcggcaatatgttgtttttctggaacttacttatggtaaccttttatttattttctaatataatgggggagtttcgtactgaggtgtaaagggatttatatggggacgtaggccgatttccgggtgttgtaggtttctctttttcaggcttatactcatgaatcttgtctgaagcttttgagggcagactgccaagtcctggagaaatagtagatggcaagtttgtgggttttttttttttacacgaatttgaggaaaaccaaatgaatttgatagccaaattgagacaatttcagcaaatctgtaagcagtttgtatgtttagttggggtaatgaagtatttcagttttgtgaatagatgacctgtttttacttcctcaccctgaattcgttttgtaaatgtagagtttggatgtgtaactgaggcgggggggagttttcagtatttttttttgtgggggtgggggcaaaatatgttttcagttctttttcccttaggtctgtctagaatcctaaaggcaaatgactcaaggtgtaacagaaaacaagaaaatccaatatcaggataatcagaccaccacaggtttacagtttatagaaactagagcagttctcacgttgaggtctgtggaagagatgtccattggagaaatggctggtagttactcttttttccccccacccccttaatcagactttaaaagtgcttaaccccttaaacttgttattttttacttgaagcattttgggatggtcttaacagggaagagagagggtgggggagaaaatgtttttttctaagattttccacagatgctatagtactattgacaaactgggttagagaaggagtgtaccgctgtgctgttggcacgaacaccttcagggactggagctgcttttatccttggaagagtattcccagttgaagctgaaaagtacagcacagtgcagctttggttcatattcagtcatctcaggagaacttcagaagagcttgagtaggccaaatgttgaagttaagttttccaataatgtgacttcttaaaagttttattaaaggggaggggcaaatattggcaattagttggcagtggcctgttacggttgggattggtggggtgggtttaggtaattgtttagtttatgattgcagataaactcatgccagagaacttaaagtcttagaatggaaaaagtaaagaaatatcaacttccaagttggcaagtaactcccaatgatttagtttttttccccccagtttgaattgggaagctgggggaagttaaatatgagccactgggtgtaccagtgcattaatttgggcaaggaaagtgtcataatttgatactgtatctgttttccttcaaagtatagagcttttggggaaggaaagtattgaactgggggttggtctggcctactgggctgacattaactacaattatgggaaatgcaaaagttgtttggatatggtagtgtgtggttctcttttggaatttttttcaggtgatttaataataatttaaaactactatagaaactgcagagcaaaggaagtggcttaatgatcctgaagggatttcttctgatggtagcttttgtattatcaagtaagattctattttcagttgtgtgtaagcaagtttttttttagtgtaggagaaatacttttccattgtttaactgcaaaacaagatgttaaggtatgcttcaaaaattttgtaaattgtttattttaaacttatctgtttgtaaattgtaactgattaagaattgtgatagttcagcttgaatgtctcttagagggtgggcttttgttgatgagggaggggaaactttttttttttctatagacttttttcagataacatcttctgagtcataaccagcctggcagtatgatggcctagatgcagagaaaacagctccttggtgaattgataagtaaaggcagaaaagattatatgtcatacctccattggggaataagcataaccctgagattcttactactgatgagaacattatctgcatatgccaaaaaattttaagcaaatgaaagctaccaatttaaagttacggaatctaccattttaaagttaattgcttgtcaagctataaccacaaaaataatgaattgatgagaaatacaatgaagaggcaatgtccatctcaaaatactgcttttacaaaagcagaataaaagcgaaaagaaatgaaaatgttacactacattaatcctggaataaaagaagccgaaataaatgagagatgagttgggatcaagtggattgaggaggctgtgctgtgtgccaatgtttcgtttgcctcagacaggtatctcttcgttatcagaagagttgcttcatttcatctgggagcagaaaacagcaggcagctgttaacagataagtttaacttgcatctgcagtattgcatgttagggataagtgcttatttttaagagctgtggagttcttaaatatcaaccatggcactttctcctgaccccttccctaggggatttcaggattgagaaatttttccatcgagcctttttaaaattgtaggacttgttcctgtgggcttcagtgatgggatagtacacttcactcagaggcatttgcatctttaaataatttcttaaaagcctctaaagtgatcagtgccttgatgccaactaaggaaatttgtttagcattgaatctctgaaggctctatgaaaggaatagcatgatgtgctgttagaatcagatgttactgctaaaatttacatgttgtgatgtaaattgtgtagaaaaccattaaatcattcaaaataataaactatttttattagagaatgtatacttttagaaagctgtctccttatttaaataaaatagtgtttgtctgtagttcagtgttggggcaatcttgggggggattcttctctaatctttcagaaactttgtctgcgaacactctttaatggaccagatcaggatttgagcggaagaacgaatgtaactttaaggcaggaaagacaaattttattcttcataaagtgatgagcatataataattccaggcacatggcaatagaggccctctaaataaggaataaataacctcttagacaggtgggagattatgatcagagtaaaaggtaattacacattttatttccagaaagtcaggggtctataaattgacagtgattagagtaatactttttcacatttccaaagtttgcatgttaactttaaatgcttacaatcttagagtggtaggcaatgttttacactattgaccttatatagggaagggagggggtgcctgtggggttttaaagaattttcctttgcagaggcatttcatccttcatgaagccattcaggattttgaattgcatatgagtgcttggctcttccttctgttctagtgagtgtatgagaccttgcagtgagtttatcagcatactcaaaatttttttcctggaatttggagggatgggaggagggggtggggcttacttgttgtagctttttttttttttacagacttcacagagaatgcagttgtcttgacttcaggtctgtctgttctgttggcaagtaaatgcagtactgttctgatcccgctgctattagaatgcattgtgaaacgactggagtatgattaaaagttgtgttccccaatgcttggagtagtgattgttgaaggaaaaaatccagctgagtgataaaggctgagtgttgaggaaatttctgcagttttaagcagtcgtatttgtgattgaagctgagtacattttgctggtgtatttttaggtaaaatgctttttgttcatttctggtggtgggaggggactgaagcctttagtcttttccagatgcaaccttaaaatcagtgacaagaaacattccaaacaagcaacagtcttcaagaaattaaactggcaagtggaaatgtttaaacagttcagtgatctttagtgcattgtttatgtgtgggtttctctctcccctcccttggtcttaattcttacatgcaggaacactcagcagacacacgtatgcgaagggccagagaagccagacccagtaagaaaaaatagcctatttactttaaataaaccaaacattccattttaaatgtggggattgggaaccactagttctttcagatggtattcttcagactatagaaggagcttccagttgaattcaccagtggacaaaatgaggaaaacaggtgaacaagctttttctgtatttacatacaaagtcagatcagttatgggacaatagtattgaatagatttcagctttatgctggagtaactggcatgtgagcaaactgtgttggcgtgggggtggaggggtgaggtgggcgctaagcctttttttaagatttttcaggtacccctcactaaaggcaccgaaggcttaaagtaggacaaccatggagccttcctgtggcaggagagacaacaaagcgctattatcctaaggtcaagagaagtgtcagcctcacctgatttttattagtaatgaggacttgcctcaactccctctttctggagtgaagcatccgaaggaatgcttgaagtacccctgggcttctcttaacatttaagcaagctgtttttatagcagctcttaataataaagcccaaatctcaagcggtgcttgaaggggagggaaagggggaaagcgggcaaccacttttccctagcttttccagaagcctgttaaaagcaaggtctccccacaagcaacttctctgccacatcgccaccccgtgccttttgatctagcacagacccttcacccctcacctcgatgcagccagtagcttggatccttgtgggcatgatccataatcggtttcaaggtaacgatggtgtcgaggtctttggtgggttgaactatgttagaaaaggccattaatttgcctgcaaattgttaacagaagggtattaaaaccacagctaagtagctctattataatacttatccagtgactaaaaccaacttaaaccagtaagtggagaaataacatgttcaagaactgtaatgctgggtgggaacatgtaacttgtagactggagaagataggcatttgagtggctgagagggcttttgggtgggaatgcaaaaattctctgctaagactttttcaggtgaacataacagacttggccaagctagcatcttagcggaagctgatctccaatgctcttcagtagggtcatgaaggtttttcttttcctgagaaaacaacacgtattgttttctcaggttttgctttttggcctttttctagcttaaaaaaaaaaaaagcaaaagatgctggtggttggcactcctggtttccaggacggggttcaaatccctgcggcgtctttgctttgactactaatctgtcttcaggactctttctgtatttctccttttctctgcaggtgctagttcttggagttttggggaggtgggaggtaacagcacaatatctttgaactatatacatccttgatgtataatttgtcaggagcttgacttgattgtatattcatatttacacgagaacctaatataactgccttgtctttttcaggtaatagcctgcagctggtgttttgagaagccctactgctgaaaacttaacaattttgtgtaataaaaatggagaagctctgtaaaggactggggccccgcaactggcctctcctgccctcttaagcgcagcgccattttagcaacgcagaagcccggcgccgggaagcctcagctcgcctgaaggcaggtcccctctgacgcctccgggagcccaggtttcccagagtccttgggacgcagcgacgagttgtgctgctatcttagctgtccttataggctggccattccaggtggtggtatttagataaaaccactcaaactctgcagtttggtcttggggtttggaggaaagcttttatttttcttcctgctccggttcagaaggtctgaagctcatacctaaccaggcataacacagaatctgcaaaacaaaaacccctaaaaaagcagacccagagcagtgtaaacacttctgggtgtgtccctgactggctgcccaaggtctctgtgtcttcggagacaaagccattcgcttagttggtctactttaaaaggccacttgaactcgctttccatggcgatttgccttgtgagcactttcaggagagcctggaagctgaaaaacggtagaaaaatttccgtgcgggccgtggggggctggcggcaactggggggccgcagatcagagtgggccactggcagccaacggcccccggggctcaggcggggagcagctctgtggtgtgggattgaggcgttttccaagagtgggttttcacgtttctaagatttcccaagcagacagcccgtgctgctccgatttctcgaacaaaaaagcaaaacgtgtggctgtcttgggagcaagtcgcaggactgcaagcagttgggggagaaagtccgccattttgccacttctcaaccgtccctgcaaggctggggctcagttgcgtaatggaaagtaaagccctgaactatcacactttaatcttccttcaaaaggtggtaaactatacctactgtccctcaagagaacacaagaagtgctttaagaggtattttaaaagttccgggggttttgtgaggtgtttgatgacccgtttaaaatatgatttccatgtttcttttgtctaaagtttgcagctcaaatctttccacacgctagtaatttaagtatttctgcatgtgtagtttgcattcaagttccataagctgttaagaaaaatctagaaaagtaaaactagaacctatttttaaccgaagaactactttttgcctccctcacaaaggcggcggaaggtgatcgaattccggtgatgcgagttgttctccgtctataaatacgcctcgcccgagctgtgcggtaggcattgaggcagccagcgcaggggcttctgctgagggggcaggcggagcttgaggaaaccgcagataagtttttttctctttgaaagatagagattaatacaactacttaaaaaatatagtcaataggttactaagatattgcttagcgttaagtttttaacgtaattttaatagcttaagattttaagagaaaatatgaagacttagaagagtagcatgaggaaggaaaagataaaaggtttctaaaacatgacggaggttgagatgaagcttcttcatggagtaaaaaatgtatttaaaagaaaattgagagaaaggactacagagccccgaattaataccaatagaagggcaatgcttttagattaaaatgaaggtgacttaaacagcttaaagtttagtttaaaagttgtaggtgattaaaataatttgaaggcgatcttttaaaaagagattaaaccgaaggtgattaaaagaccttgaaatccatgacgcagggagaattgcgtcatttaaagcctagttaacgcatttactaaacgcagacgaaaatggaaagattaattgggagtggtaggatgaaacaatttggagaagatagaagtttgaagtggaaaactggaagacagaagtacgggaaggcgaagaaaagaatagagaagatagggaaattagaagataaaaacatacttttagaagaaaaaagataaatttaaacctgaaaagtaggaagcagaagaaaaaagacaagctaggaaacaaaaagctaagggcaaaatgtacaaacttagaagaaaattggaagatagaaacaagatagaaaatgaaaatattgtcaagagtttcagatagaaaatgaaaaacaagctaagacaagtattggagaagtatagaagatagaaaaatataaagccaaaaattggataaaatagcactgaaaaaatgaggaaattattggtaaccaatttattttaaaagcccatcaatttaatttctggtggtgcagaagttagaaggtaaagcttgagaagatgagggtgtttacgtagaccagaaccaatttagaagaatacttgaagctagaaggggaagttggttaaaaatcacatcaaaaagctactaaaaggactggtgtaatttaaaaaaaactaaggcagaaggcttttggaagagttagaagaatttggaaggccttaaatatagtagcttagtttgaaaaatgtgaaggactttcgtaacggaagtaattcaagatcaagagtaattaccaacttaatgtttttgcattggactttgagttaagattattttttaaatcctgaggactagcattaattgacagctgacccaggtgctacacagaagtggattcagtgaatctaggaagacagcagcagacaggattccaggaaccagtgtttgatgaagctaggactgaggagcaagcgagcaagcagcagttcgtggtgaagataggaaaagagtccaggagccagtgcgatttggtgaaggaagctaggaagaaggaaggagcgctaacgatttggtggtgaagctaggaaaaaggattccaggaaggagcgagtgcaatttggtgatgaaggtagcaggcggcttggcttggcaaccacacggaggaggcgagcaggcgttgtgcgtagaggatcctagaccagcatgccagtgtgccaaggccacagggaaagcgagtggttggtaaaaatccgtgaggtcggcaatatgttgtttttctggaacttacttatggtaaccttttatttattttctaatataatgggggagtttcgtactgaggtgtaaagggatttatatggggacgtaggccgatttccgggtgttgtaggtttctctttttcaggcttatactcatgaatcttgtctgaagcttttgagggcagactgccaagtcctggagaaatagtagatggcaagtttgtgggttttttttttttacacgaatttgaggaaaaccaaatgaatttgatagccaaattgagacaatttcagcaaatctgtaagcagtttgtatgtttagttggggtaatgaagtatttcagttttgtgaatagatgacctgtttttacttcctcaccctgaattcgttttgtaaatgtagagtttggatgtgtaactgaggcgggggggagttttcagtatttttttttgtgggggtgggggcaaaatatgttttcagttctttttcccttaggtctgtctagaatcctaaaggcaaatgactcaaggtgtaacagaaaacaagaaaatccaatatcaggataatcagaccaccacaggtttacagtttatagaaactagagcagttctcacgttgaggtctgtggaagagatgtccattggagaaatggctggtagttactcttttttccccccacccccttaatcagactttaaaagtgcttaaccccttaaacttgttattttttacttgaagcattttgggatggtcttaacagggaagagagagggtgggggagaaaatgtttttttctaagattttccacagatgctatagtactattgacaaactgggttagagaaggagtgtaccgctgtgctgttggcacgaacaccttcagggactggagctgcttttatccttggaagagtattcccagttgaagctgaaaagtacagcacagtgcagctttggttcatattcagtcatctcaggagaacttcagaagagcttgagtaggccaaatgttgaagttaagttttccaataatgtgacttcttaaaagttttattaaaggggaggggcaaatattggcaattagttggcagtggcctgttacggttgggattggtggggtgggtttaggtaattgtttagtttatgattgcagataaactcatgccagagaacttaaagtcttagaatggaaaaagtaaagaaatatcaacttccaagttggcaagtaactcccaatgatttagtttttttccccccagtttgaattgggaagctgggggaagttaaatatgagccactgggtgtaccagtgcattaatttgggcaaggaaagtgtcataatttgatactgtatctgttttccttcaaagtatagagcttttggggaaggaaagtattgaactgggggttggtctggcctactgggctgacattaactacaattatgggaaatgcaaaagttgtttggatatggtagtgtgtggttctcttttggaatttttttcaggtgatttaataataatttaaaactactatagaaactgcagagcaaaggaagtggcttaatgatcctgaagggatttcttctgatggtagcttttgtattatcaagtaagattctattttcagttgtgtgtaagcaagtttttttttagtgtaggagaaatacttttccattgtttaactgcaaaacaagatgttaaggtatgcttcaaaaattttgtaaattgtttattttaaacttatctgtttgtaaattgtaactgattaagaattgtgatagttcagcttgaatgtctcttagagggtgggcttttgttgatgagggaggggaaactttttttttttctatagacttttttcagataacatcttctgagtcataaccagcctggcagtatgatggcctagatgcagagaaaacagctccttggtgaattgataagtaaaggcagaaaagattatatgtcatacctccattggggaataagcataaccctgagattcttactactgatgagaacattatctgcatatgccaaaaaattttaagcaaatgaaagctaccaatttaaagttacggaatctaccattttaaagttaattgcttgtcaagctataaccacaaaaataatgaattgatgagaaatacaatgaagaggcaatgtccatctcaaaatactgcttttacaaaagcagaataaaagcgaaaagaaatgaaaatgttacactacattaatcctggaataaaagaagccgaaataaatgagagatgagttgggatcaagtggattgaggaggctgtgctgtgtgccaatgtttcgtttgcctcagacaggtatctcttcgttatcagaagagttgcttcatttcatctgggagcagaaaacagcaggcagctgttaacagataagtttaacttgcatctgcagtattgcatgttagggataagtgcttatttttaagagctgtggagttcttaaatatcaaccatggcactttctcctgaccccttccctaggggatttcaggattgagaaatttttccatcgagcctttttaaaattgtaggacttgttcctgtgggcttcagtgatgggatagtacacttcactcagaggcatttgcatctttaaataatttcttaaaagcctctaaagtgatcagtgccttgatgccaactaaggaaatttgtttagcattgaatctctgaaggctctatgaaaggaatagcatgatgtgctgttagaatcagatgttactgctaaaatttacatgttgtgatgtaaattgtgtagaaaaccattaaatcattcaaaataataaactatttttattagagaatgtatacttttagaaagctgtctccttatttaaataaaatagtgtttgtctgtagttcagtgttggggcaatcttgggggggattcttctctaatctttcagaaactttgtctgcgaacactctttaatggaccagatcaggatttgagcggaagaacgaatgtaactttaaggcaggaaagacaaattttattcttcataaagtgatgagcatataataattccaggcacatggcaatagaggccctctaaataaggaataaataacctcttagacaggtgggagattatgatcagagtaaaaggtaattacacattttatttccagaaagtcaggggtctataaattgacagtgattagagtaatactttttcacatttccaaagtttgcatgttaactttaaatgcttacaatcttagagtggtaggcaatgttttacactattgaccttatatagggaagggagggggtgcctgtggggttttaaagaattttcctttgcagaggcatttcatccttcatgaagccattcaggattttgaattgcatatgagtgcttggctcttccttctgttctagtgagtgtatgagaccttgcagtgagtttatcagcatactcaaaatttttttcctggaatttggagggatgggaggagggggtggggcttacttgttgtagctttttttttttttacagacttcacagagaatgcagttgtcttgacttcaggtctgtctgttctgttggcaagtaaatgcagtactgttctgatcccgctgctattagaatgcattgtgaaacgactggagtatgattaaaagttgtgttccccaatgcttggagtagtgattgttgaaggaaaaaatccagctgagtgataaaggctgagtgttgaggaaatttctgcagttttaagcagtcgtatttgtgattgaagctgagtacattttgctggtgtatttttaggtaaaatgctttttgttcatttctggtggtgggaggggactgaagcctttagtcttttccagatgcaaccttaaaatcagtgacaagaaacattccaaacaagcaacagtcttcaagaaattaaactggcaagtggaaatgtttaaacagttcagtgatctttagtgcattgtttatgtgtgggtttctctctcccctcccttggtcttaattcttacatgcaggaacactcagcagacacacgtatgcgaagggccagagaagccagacccagtaagaaaaaatagcctatttactttaaataaaccaaacattccattttaaatgtggggattgggaaccactagttctttcagatggtattcttcagactatagaaggagcttccagttgaattcaccagtggacaaaatgaggaaaacaggtgaacaagctttttctgtatttacatacaaagtcagatcagttatgggacaatagtattgaatagatttcagctttatgctggagtaactggcatgtgagcaaactgtgttggcgtgggggtggaggggtgaggtgggcgctaagcctttttttaagatttttcaggtacccctcactaaaggcaccgaaggcttaaagtaggacaaccatggagccttcctgtggcaggagagacaacaaagcgctattatcctaaggtcaagagaagtgtcagcctcacctgatttttattagtaatgaggacttgcctcaactccctctttctggagtgaagcatccgaaggaatgcttgaagtacccctgggcttctcttaacatttaagcaagctgtttttatagcagctcttaataataaagcccaaatctcaagcggtgcttgaaggggagggaaagggggaaagcgggcaaccacttttccctagcttttccagaagcctgttaaaagcaaggtctccccacaagcaacttctctgccacatcgccaccccgtgccttttgatctagcacagacccttcacccctcacctcgatgcagccagtagcttggatccttgtgggcatgatccataatcggtttcaaggtaacgatggtgtcgaggtctttggtgggttgaactatgttagaaaaggccattaatttgcctgcaaattgttaacagaagggtattaaaaccacagctaagtagctctattataatacttatccagtgactaaaaccaacttaaaccagtaagtggagaaataacatgttcaagaactgtaatgctgggtgggaacatgtaacttgtagactggagaagataggcatttgagtggctgagagggcttttgggtgggaatgcaaaaattctctgctaagactttttcaggtgaacataacagacttggccaagctagcatcttagcggaagctgatctccaatgctcttcagtagggtcatgaaggtttttcttttcctgagaaaacaacacgtattgttttctcaggttttgctttttggcctttttctagcttaaaaaaaaaaaaagcaaaagatgctggtggttggcactcctggtttccaggacggggttcaaatccctgcggcgtctttgctttgactactaatctgtcttcaggactctttctgtatttctccttttctctgcaggtgctagttcttggagttttggggaggtgggaggtaacagcacaatatctttgaactatatacatccttgatgtataatttgtcaggagcttgacttgattgtatattcatatttacacgagaacctaatataactgccttgtctttttcaggtaatagcctgcagctggtgttttgagaagccctactgctgaaaacttaacaattttgtgtaataaaaatggagaagctctgtaaaggactggggccccgcaactggcctctcctgccctcttaagcgcagcgccattttagcaacgcagaagcccggcgccgggaagcctcagctcgcctgaaggcaggtcccctctgacgcctccgggagcccaggtttcccagagtccttgggacgcagcgacgagttgtgctgctatcttagctgtccttataggctggccattccaggtggtggtatttagataaaaccactcaaactctgcagtttggtcttggggtttggaggaaagcttttatttttcttcctgctccggttcagaaggtctgaagctcatacctaaccaggcataacacagaatctgcaaaacaaaaacccctaaaaaagcagacccagagcagtgtaaacacttctgggtgtgtccctgactggctgcccaaggtctctgtgtcttcggagacaaagccattcgcttagttggtctactttaaaaggccacttgaactcgctttccatggcgatttgccttgtgagcactttcaggagagcctggaagctgaaaaacggtagaaaaatttccgtgcgggccgtggggggctggcggcaactggggggccgcagatcagagtgggccactggcagccaacggcccccggggctcaggcggggagcagctctgtggtgtgggattgaggcgttttccaagagtgggttttcacgtttctaagatttcccaagcagacagcccgtgctgctccgatttctcgaacaaaaaagcaaaacgtgtggctgtcttgggagcaagtcgcaggactgcaagcagttgggggagaaagtccgccattttgccacttctcaaccgtccctgcaaggctggggctcagttgcgtaatggaaagtaaagccctgaactatcacactttaatcttccttcaaaaggtggtaaactatacctactgtccctcaagagaacacaagaagtgctttaagaggtattttaaaagttccgggggttttgtgaggtgtttgatgacccgtttaaaatatgatttccatgtttcttttgtctaaagtttgcagctcaaatctttccacacgctagtaatttaagtatttctgcatgtgtagtttgcattcaagttccataagctgttaagaaaaatctagaaaagtaaaactagaacctatttttaaccgaagaactactttttgcctccctcacaaaggcggcggaaggtgatcgaattccggtgatgcgagttgttctccgtctataaatacgcctcgcccgagctgtgcggtaggcattgaggcagccagcgcaggggcttctgctgagggggcaggcggagcttgaggaaaccgcagataagtttttttctctttgaaagatagagattaatacaactacttaaaaaatatagtcaataggttactaagatattgcttagcgttaagtttttaacgtaattttaatagcttaagattttaagagaaaatatgaagacttagaagagtagcatgaggaaggaaaagataaaaggtttctaaaacatgacggaggttgagatgaagcttcttcatggagtaaaaaatgtatttaaaagaaaattgagagaaaggactacagagccccgaattaataccaatagaagggcaatgcttttagattaaaatgaaggtgacttaaacagcttaaagtttagtttaaaagttgtaggtgattaaaataatttgaaggcgatcttttaaaaagagattaaaccgaaggtgattaaaagaccttgaaatccatgacgcagggagaattgcgtcatttaaagcctagttaacgcatttactaaacgcagacgaaaatggaaagattaattgggagtggtaggatgaaacaatttggagaagatagaagtttgaagtggaaaactggaagacagaagtacgggaaggcgaagaaaagaatagagaagatagggaaattagaagataaaaacatacttttagaagaaaaaagataaatttaaacctgaaaagtaggaagcagaagaaaaaagacaagctaggaaacaaaaagctaagggcaaaatgtacaaacttagaagaaaattggaagatagaaacaagatagaaaatgaaaatattgtcaagagtttcagatagaaaatgaaaaacaagctaagacaagtattggagaagtatagaagatagaaaaatataaagccaaaaattggataaaatagcactgaaaaaatgaggaaattattggtaaccaatttattttaaaagcccatcaatttaatttctggtggtgcagaagttagaaggtaaagcttgagaagatgagggtgtttacgtagaccagaaccaatttagaagaatacttgaagctagaaggggaagttggttaaaaatcacatcaaaaagctactaaaaggactggtgtaatttaaaaaaaactaaggcagaaggcttttggaagagttagaagaatttggaaggccttaaatatagtagcttagtttgaaaaatgtgaaggactttcgtaacggaagtaattcaagatcaagagtaattaccaacttaatgtttttgcattggactttgagttaagattattttttaaatcctgaggactagcattaattgacagctgacccaggtgctacacagaagtggattcagtgaatctaggaagacagcagcagacaggattccaggaaccagtgtttgatgaagctaggactgaggagcaagcgagcaagcagcagttcgtggtgaagataggaaaagagtccaggagccagtgcgatttggtgaaggaagctaggaagaaggaaggagcgctaacgatttggtggtgaagctaggaaaaaggattccaggaaggagcgagtgcaatttggtgatgaaggtagcaggcggcttggcttggcaaccacacggaggaggcgagcaggcgttgtgcgtagaggatcctagaccagcatgccagtgtgccaaggccacagggaaagcgagtggttggtaaaaatccgtgaggtcggcaatatgttgtttttctggaacttacttatggtaaccttttatttattttctaatataatgggggagtttcgtactgaggtgtaaagggatttatatggggacgtaggccgatttccgggtgttgtaggtttctctttttcaggcttatactcatgaatcttgtctgaagcttttgagggcagactgccaagtcctggagaaatagtagatggcaagtttgtgggttttttttttttacacgaatttgaggaaaaccaaatgaatttgatagccaaattgagacaatttcagcaaatctgtaagcagtttgtatgtttagttggggtaatgaagtatttcagttttgtgaatagatgacctgtttttacttcctcaccctgaattcgttttgtaaatgtagagtttggatgtgtaactgaggcgggggggagttttcagtatttttttttgtgggggtgggggcaaaatatgttttcagttctttttcccttaggtctgtctagaatcctaaaggcaaatgactcaaggtgtaacagaaaacaagaaaatccaatatcaggataatcagaccaccacaggtttacagtttatagaaactagagcagttctcacgttgaggtctgtggaagagatgtccattggagaaatggctggtagttactcttttttccccccacccccttaatcagactttaaaagtgcttaaccccttaaacttgttattttttacttgaagcattttgggatggtcttaacagggaagagagagggtgggggagaaaatgtttttttctaagattttccacagatgctatagtactattgacaaactgggttagagaaggagtgtaccgctgtgctgttggcacgaacaccttcagggactggagctgcttttatccttggaagagtattcccagttgaagctgaaaagtacagcacagtgcagctttggttcatattcagtcatctcaggagaacttcagaagagcttgagtaggccaaatgttgaagttaagttttccaataatgtgacttcttaaaagttttattaaaggggaggggcaaatattggcaattagttggcagtggcctgttacggttgggattggtggggtgggtttaggtaattgtttagtttatgattgcagataaactcatgccagagaacttaaagtcttagaatggaaaaagtaaagaaatatcaacttccaagttggcaagtaactcccaatgatttagtttttttccccccagtttgaattgggaagctgggggaagttaaatatgagccactgggtgtaccagtgcattaatttgggcaaggaaagtgtcataatttgatactgtatctgttttccttcaaagtatagagcttttggggaaggaaagtattgaactgggggttggtctggcctactgggctgacattaactacaattatgggaaatgcaaaagttgtttggatatggtagtgtgtggttctcttttggaatttttttcaggtgatttaataataatttaaaactactatagaaactgcagagcaaaggaagtggcttaatgatcctgaagggatttcttctgatggtagcttttgtattatcaagtaagattctattttcagttgtgtgtaagcaagtttttttttagtgtaggagaaatacttttccattgtttaactgcaaaacaagatgttaaggtatgcttcaaaaattttgtaaattgtttattttaaacttatctgtttgtaaattgtaactgattaagaattgtgatagttcagcttgaatgtctcttagagggtgggcttttgttgatgagggaggggaaactttttttttttctatagacttttttcagataacatcttctgagtcataaccagcctggcagtatgatggcctagatgcagagaaaacagctccttggtgaattgataagtaaaggcagaaaagattatatgtcatacctccattggggaataagcataaccctgagattcttactactgatgagaacattatctgcatatgccaaaaaattttaagcaaatgaaagctaccaatttaaagttacggaatctaccattttaaagttaattgcttgtcaagctataaccacaaaaataatgaattgatgagaaatacaatgaagaggcaatgtccatctcaaaatactgcttttacaaaagcagaataaaagcgaaaagaaatgaaaatgttacactacattaatcctggaataaaagaagccgaaataaatgagagatgagttgggatcaagtggattgaggaggctgtgctgtgtgccaatgtttcgtttgcctcagacaggtatctcttcgttatcagaagagttgcttcatttcatctgggagcagaaaacagcaggcagctgttaacagataagtttaacttgcatctgcagtattgcatgttagggataagtgcttatttttaagagctgtggagttcttaaatatcaaccatggcactttctcctgaccccttccctaggggatttcaggattgagaaatttttccatcgagcctttttaaaattgtaggacttgttcctgtgggcttcagtgatgggatagtacacttcactcagaggcatttgcatctttaaataatttcttaaaagcctctaaagtgatcagtgccttgatgccaactaaggaaatttgtttagcattgaatctctgaaggctctatgaaaggaatagcatgatgtgctgttagaatcagatgttactgctaaaatttacatgttgtgatgtaaattgtgtagaaaaccattaaatcattcaaaataataaactatttttattagagaatgtatacttttagaaagctgtctccttatttaaataaaatagtgtttgtctgtagttcagtgttggggcaatcttgggggggattcttctctaatctttcagaaactttgtctgcgaacactctttaatggaccagatcaggatttgagcggaagaacgaatgtaactttaaggcaggaaagacaaattttattcttcataaagtgatgagcatataataattccaggcacatggcaatagaggccctctaaataaggaataaataacctcttagacaggtgggagattatgatcagagtaaaaggtaattacacattttatttccagaaagtcaggggtctataaattgacagtgattagagtaatactttttcacatttccaaagtttgcatgttaactttaaatgcttacaatcttagagtggtaggcaatgttttacactattgaccttatatagggaagggagggggtgcctgtggggttttaaagaattttcctttgcagaggcatttcatccttcatgaagccattcaggattttgaattgcatatgagtgcttggctcttccttctgttctagtgagtgtatgagaccttgcagtgagtttatcagcatactcaaaatttttttcctggaatttggagggatgggaggagggggtggggcttacttgttgtagctttttttttttttacagacttcacagagaatgcagttgtcttgacttcaggtctgtctgttctgttggcaagtaaatgcagtactgttctgatcccgctgctatt

SEQ ID NO: 820 - DNA, 32767 bp, Homo sapiens; identical to SEQ ID NO: 819

SEQ ID NO: 821 - DNA, 32767 bp, Homo sapiens; identical to SEQ ID NO: 819

SEQ ID NO: 822 - DNA, 32765 bp, Homo sapiens
  misc_feature (69)..(69): second gene starts at position 69
atggatgattttgagcgtcgcagagaacttagaaggcaaaagagggaggagatgcgactcgaagcagaaagaatcgcctaccagaggaatgacgatgatgaagaggaggcagcccgggaacggcgccgccgagcccgacaggaacggctgcggcagaagcaggaggaagaatccttgggacaggtgaccgaccaggtggaggtgaatgcccagaacagtgtgcctgacgaggaggccaagacaaccaccacaaacactcaagtggaaggggatgatgaggccgcattcctggagcgcctggctcggcgtgaggaaagacgccaaaaacgccttcaggaggctctggagcggcagaaggagttcgacccaacaataacagatgcaagtctgtcgctcccaagcagaagaatgcaaaatgacacagcagaaaatgaaactaccgagaaggaagaaaaaagtgaaagtcgccaagaaagatacgagatagaggaaacagaaacagtcaccaagtcctaccagaagaatgattggagggatgctgaagaaaacaagaaagaagacaaggaaaaggaggaggaggaagaggagaagccaaagcgagggagcattggagaaaatcagggagaagagaagggaactaaagtgcaagctaaaagagaaaagctccaagaagacaagcctaccttcaaaaaagaagagatcaaagatgaaaagattaaaaaggacaaagaacccaaagaagaagttaagagcttcatggatcgaaagaagggatttacagaagttaagtcgcagaatggagaattcatgacccacaaacttaaacatactgagaatactttcagccgccctggagggagggccagcgtggacaccaaggaggctgagggcgccccccaggtggaagccggcaaaaggctggaggagcttcgtcgtcgtcgcggggagaccgagagcgaagagttcgagaagctcaaacagaagcagcaggaggcggctttggagctggaggaactcaagaaaaagagggaggagagaaggaaggtcctggaggaggaagagcagaggctcctgctcctcttagcggccaccgccctcctgacgcacggccaagaggaaggccaagtcgagggccaagacgaagacatcccaccaatcacctgcgtacagaacggcctcaggtaccatgaccgagacgtgtggaaacccgagccctgccggatctgcgtctgcgacaacggcaaggtgttgtgcgatgacgtgatctgtgacgagaccaagaactgccccggcgccgaagtccccgagggcgagtgctgtcccgtctgccccgacggctcagagtcacccaccgaccaagaaaccaccggcgtcgagggacccaagggagacactggcccccgaggcccaaggggacccgcaggcccccctggccgagatggcatccctggacagcctggacttcccggaccccccggaccccccggacctcccggaccccctggcctcggaggaaactttgctccccagctgtcttatggctatgatgagaaatcaaccggaggaatttccgtgcctggccccatgggtccctctggtcctcgtggtctccctggcccccctggtgcacctggtccccaaggcttccaaggtccccctggtgagcctggcgagcctggagcttcaggtcccatgggtccccgaggtcccccaggtccccctggaaagaatggagatgatggggaagctggaaaacctggtcgtcctggtgagcgtgggcctcctgggcctcagggtgctcgaggattgcccggaacagctggcctccctggaatgaagggacacagaggtttcagtggtttggatggtgccaagggagatgctggtcctgctggtcctaagggtgagcctggcagccctggtgaaaatggagctcctggtcagatgggcccccgtggcctgcctggtgagagaggtcgccctggagcccctggccctgctggtgctcgtggaaatgatggtgctactggtgctgccgggccccctggtcccaccggccccgctggtcctcctggcttccctggtgctgttggtgctaagggtgaagctggtccccaagggccccgaggctctgaaggtccccagggtgtgcgtggtgagcctggcccccctggccctgctggtgctgctggccctgctggaaaccctggtgctgatggacagcctggtgctaaaggtgccaatggtgctcctggtattgctggtgctcctggcttccctggtgcccgaggcccctctggaccccagggccccggcggccctcctggtcccaagggtaacagcggtgaacctggtgctcctggcagcaaaggagacactggtgctaagggagagcctggccctgttggtgttcaaggaccccctggccctgctggagaggaaggaaagcgaggagctcgaggtgaacccggacccactggcctgcccggaccccctggcgagcgtggtggacctggtagccgtggtttccctggcgcagatggtgttgctggtcccaagggtcccgctggtgaacgtggttctcctggccctgctggccccaaaggatctcctggtgaagctggtcgtcccggtgaagctggtctgcctggtgccaagggtctgactggaagccctggcagccctggtcctgatggcaaaactggcccccctggtcccgccggtcaagatggtcgccccggacccccaggcccacctggtgcccgtggtcaggctggtgtgatgggattccctggacctaaaggtgctgctggagagcccggcaaggctggagagcgaggtgttcccggaccccctggcgctgtcggtcctgctggcaaagatggagaggctggagctcagggaccccctggccctgctggtcccgctggcgagagaggtgaacaaggccctgctggctcccccggattccagggtctccctggtcctgctggtcctccaggtgaagcaggcaaacctggtgaacagggtgttcctggagaccttggcgcccctggcccctctggagcaagaggcgagagaggtttccctggcgagcgtggtgtgcaaggtccccctggtcctgctggtccccgaggggccaacggtgctcccggcaacgatggtgctaagggtgatgctggtgcccctggagctcccggtagccagggcgcccctggccttcagggaatgcctggtgaacgtggtgcagctggtcttccagggcctaagggtgacagaggtgatgctggtcccaaaggtgctgatggctctcctggcaaagatggcgtccgtggtctgactggccccattggtcctcctggccctgctggtgcccctggtgacaagggtgaaagtggtcccagcggccctgctggtcccactggagctcgtggtgcccccggagaccgtggtgagcctggtccccccggccctgctggctttgctggcccccctggtgctgacggccaacctggtgctaaaggcgaacctggtgatgctggtgctaaaggcgatgctggtccccctggccctgccggacccgctggaccccctggccccattggtaatgttggtgctcctggagccaaaggtgctcgcggcagcgctggtccccctggtgctactggtttccctggtgctgctggccgagtcggtcctcctggcccctctggaaatgctggaccccctggccctcctggtcctgctggcaaagaaggcggcaaaggtccccgtggtgagactggccctgctggacgtcctggtgaagttggtccccctggtccccctggccctgctggcgagaaaggatcccctggtgctgatggtcctgctggtgctcctggtactcccgggcctcaaggtattgctggacagcgtggtgtggtcggcctgcctggtcagagaggagagagaggcttccctggtcttcctggcccctctggtgaacctggcaaacaaggtccctctggagcaagtggtgaacgtggtccccctggtcccatgggcccccctggattggctggaccccctggtgaatctggacgtgagggggctcctggtgccgaaggttcccctggacgagacggttctcctggcgccaagggtgaccgtggtgagaccggccccgctggaccccctggtgctcctggtgctcctggtgcccctggccccgttggccctgctggcaagagtggtgatcgtggtgagactggtcctgctggtcccaccggtcctgtcggccctgttggcgcccgtggccccgccggaccccaaggcccccgtggtgacaagggtgagacaggcgaacagggcgacagaggcataaagggtcaccgtggcttctctggcctccagggtccccctggccctcctggctctcctggtgaacaaggtccctctggagcctctggtcctgctggtccccgaggtccccctggctctgctggtgctcctggcaaagatggactcaacggtctccctggccccattgggccccctggtcctcgcggtcgcactggtgatgctggtcctgttggtccccccggccctcctggacctcctggtccccctggtcctcccagcgctggtttcgacttcagcttcctgccccagccacctcaagagaaggctcacgatggtggccgctactaccgggctgatgatgccaatgtggttcgtgaccgtgacctcgaggtggacaccaccctcaagagcctgagccagcagatcgagaacatccggagcccagagggcagccgcaagaaccccgcccgcacctgccgtgacctcaagatgtgccactctgactggaagagtggagagtactggattgaccccaaccaaggctgcaacctggatgccatcaaagtcttctgcaacatggagactggtgagacctgcgtgtaccccactcagcccagtgtggcccagaagaactggtacatcagcaagaaccccaaggacaagaggcatgtctggttcggcgagagcatgaccgatggattccagttcgagtatggcggccagggctccgaccctgccgatgtggccatccagctgaccttcctgcgcctgatgtccaccgaggcctcccagaacatcacctaccactgcaagaacagcgtggcctacatggaccagcagactggcaacctcaagaaggccctgctcctccagggctccaacgagatcgagatccgcgccgagggcaacagccgcttcacctacagcgtcactgtcgatggctgcacgagtcacaccggagcctggggcaagacagtgattgaatacaaaaccaccaagacctcccgcctgcccatcatcgatgtggcccccttggacgttggtgccccagaccaggaattcggcttcgacgttggccctgtctgcttcctgtaaactccctccatcccaacctggctccctcccacccaaccaactttccccccaacccggaaacagacaagcaacccaaactgaaccccctcaaaagccaaaaaatgggagacaatttcacatggactttggaaaatatttttttcctttgcattcatctctcaaacttagtttttatctttgaccaaccgaacatgaccaaaaaccaaaagtgcattcaaccttaccaaaaaaaaaaaaaaaaaaagaataaataaataactttttaaaaaaggaagcttggtccacttgcttgaagacccatgcgggggtaagtccctttctgcccgttgggcttatgaaaccccaatgctgccctttctgctcctttctccacaccccccttggggcctcccctccactccttcccaaatctgtctccccagaagacacaggaaacaatgtattgtctgcccagcaatcaaaggcaatgctcaaacacccaagtggcccccaccctcagcccgctcctgcccgcccagcacccccaggccctgggggacctggggttctcagactgccaaagaagccttgccatctggcgctcccatggctcttgcaacatctccccttcgtttttgagggggtcatgccgggggagccaccagcccctcactgggttcggaggagagtcaggaagggccacgacaaagcagaaacatcggatttggggaacgcgtgtcaatcccttgtgccgcagggctgggcgggagagactgttctgttccttgtgtaactgtgttgctgaaagactacctcgttcttgtcttgatgtgtcaccggggcaactgcctgggggcggggatgggggcagggtggaagcggctccccattttataccaaaggtgctacatctatgtgatgggtggggtggggagggaatcactggtgctatagaaattgagatgcccccccaggccagcaaatgttcctttttgttcaaagtctatttttattccttgatatttttctttttttttttttttttttgtggatggggacttgtgaatttttctaaaggtgctatttaacatgggaggagagcgtgtgcggctccagcccagcccgctgctcactttccaccctctctccacctgcctctggcttctcaggcctctgctctccgacctctctcctctgaaaccctcctccacagctgcagcccatcctcccggctccctcctagtctgtcctgcgtcctctgtccccgggtttcagagacaacttcccaaagcacaaagcagtttttccccctaggggtgggaggaagcaaaagactctgtacctattttgtatgtgtataataatttgagatgtttttaattattttgattgctggaataaagcatgtggaaatgacccaaacataatcgtcggagcagacgggagtttctcctcggggtcggagcaggaggcacgcggagtgtgaggccacgcatgagcggacgctaaccccctccccagccacaaagagtctacatgtctagggtctagacatgttcagctttgtggacctccggctcctgctcctcttagcggccaccgccctcctgacgcacggccaagaggaaggccaagtcgagggccaagacgaagacatcccaccaatcacctgcgtacagaacggcctcaggtaccatgaccgagacgtgtggaaacccgagccctgccggatctgcgtctgcgacaacggcaaggtgttgtgcgatgacgtgatctgtgacgagaccaagaactgccccggcgccgaagtccccgagggcgagtgctgtcccgtctgccccgacggctcagagtcacccaccgaccaagaaaccaccggcgtcgagggacccaagggagacactggcccccgaggcccaaggggacccgcaggcccccctggccgagatggcatccctggacagcctggacttcccggaccccccggaccccccggacctcccggaccccctggcctcggaggaaactttgctccccagctgtcttatggctatgatgagaaatcaaccggaggaatttccgtgcctggccccatgggtccctctggtcctcgtggtctccctggcccccctggtgcacctggtccccaaggcttccaaggtccccctggtgagcctggcgagcctggagcttcaggtcccatgggtccccgaggtcccccaggtccccctggaaagaatggagatgatggggaagctggaaaacctggtcgtcctggtgagcgtgggcctcctgggcctcagggtgctcgaggattgcccggaacagctggcctccctggaatgaagggacacagaggtttcagtggtttggatggtgccaagggagatgctggtcctgctggtcctaagggtgagcctggcagccctggtgaaaatggagctcctggtcagatgggcccccgtggcctgcctggtgagagaggtcgccctggagcccctggccctgctggtgctcgtggaaatgatggtgctactggtgctgccgggccccctggtcccaccggccccgctggtcctcctggcttccctggtgctgttggtgctaagggtgaagctggtccccaagggccccgaggctctgaaggtccccagggtgtgcgtggtgagcctggcccccctggccctgctggtgctgctggccctgctggaaaccctggtgctgatggacagcctggtgctaaaggtgccaatggtgctcctggtattgctggtgctcctggcttccctggtgcccgaggcccctctggaccccagggccccggcggccctcctggtcccaagggtaacagcggtgaacctggtgctcctggcagcaaaggagacactggtgctaagggagagcctggccctgttggtgttcaaggaccccctggccctgctggagaggaaggaaagcgaggagctcgaggtgaacccggacccactggcctgcccggaccccctggcgagcgtggtggacctggtagccgtggtttccctggcgcagatggtgttgctggtcccaagggtcccgctggtgaacgtggttctcctggccctgctggccccaaaggatctcctggtgaagctggtcgtcccggtgaagctggtctgcctggtgccaagggtctgactggaagccctggcagccctggtcctgatggcaaaactggcccccctggtcccgccggtcaagatggtcgccccggacccccaggcccacctggtgcccgtggtcaggctggtgtgatgggattccctggacctaaaggtgctgctggagagcccggcaaggctggagagcgaggtgttcccggaccccctggcgctgtcggtcctgctggcaaagatggagaggctggagctcagggaccccctggccctgctggtcccgctggcgagagaggtgaacaaggccctgctggctcccccggattccagggtctccctggtcctgctggtcctccaggtgaagcaggcaaacctggtgaacagggtgttcctggagaccttggcgcccctggcccctctggagcaagaggcgagagaggtttccctggcgagcgtggtgtgcaaggtccccctggtcctgctggtccccgaggggccaacggtgctcccggcaacgatggtgctaagggtgatgctggtgcccctggagctcccggtagccagggcgcccctggccttcagggaatgcctggtgaacgtggtgcagctggtcttccagggcctaagggtgacagaggtgatgctggtcccaaaggtgctgatggctctcctggcaaagatggcgtccgtggtctgactggccccattggtcctcctggccctgctggtgcccctggtgacaagggtgaaagtggtcccagcggccctgctggtcccactggagctcgtggtgcccccggagaccgtggtgagcctggtccccccggccctgctggctttgctggcccccctggtgctgacggccaacctggtgctaaaggcgaacctggtgatgctggtgctaaaggcgatgctggtccccctggccctgccggacccgctggaccccctggccccattggtaatgttggtgctcctggagccaaaggtgctcgcggcagcgctggtccccctggtgctactggtttccctggtgctgctggccgagtcggtcctcctggcccctctggaaatgctggaccccctggccctcctggtcctgctggcaaagaaggcggcaaaggtccccgtggtgagactggccctgctggacgtcctggtgaagttggtccccctggtccccctggccctgctggcgagaaaggatcccctggtgctgatggtcctgctggtgctcctggtactcccgggcctcaaggtattgctggacagcgtggtgtggtcggcctgcctggtcagagaggagagagaggcttccctggtcttcctggcccctctggtgaacctggcaaacaaggtccctctggagcaagtggtgaacgtggtccccctggtcccatgggcccccctggattggctggaccccctggtgaatctggacgtgagggggctcctggtgccgaaggttcccctggacgagacggttctcctggcgccaagggtgaccgtggtgagaccggccccgctggaccccctggtgctcctggtgctcctggtgcccctggccccgttggccctgctggcaagagtggtgatcgtggtgagactggtcctgctggtcccaccggtcctgtcggccctgttggcgcccgtggccccgccggaccccaaggcccccgtggtgacaagggtgagacaggcgaacagggcgacagaggcataaagggtcaccgtggcttctctggcctccagggtccccctggccctcctggctctcctggtgaacaaggtccctctggagcctctggtcctgctggtccccgaggtccccctggctctgctggtgctcctggcaaagatggactcaacggtctccctggccccattgggccccctggtcctcgcggtcgcactggtgatgctggtcctgttggtccccccggccctcctggacctcctggtccccctggtcctcccagcgctggtttcgacttcagcttcctgccccagccacctcaagagaaggctcacgatggtggccgctactaccgggctgatgatgccaatgtggttcgtgaccgtgacctcgaggtggacaccaccctcaagagcctgagccagcagatcgagaacatccggagcccagagggcagccgcaagaaccccgcccgcacctgccgtgacctcaagatgtgccactctgactggaagagtggagagtactggattgaccccaaccaaggctgcaacctggatgccatcaaagtcttctgcaacatggagactggtgagacctgcgtgtaccccactcagcccagtgtggcccagaagaactggtacatcagcaagaaccccaaggacaagaggcatgtctggttcggcgagagcatgaccgatggattccagttcgagtatggcggccagggctccgaccctgccgatgtggccatccagctgaccttcctgcgcctgatgtccaccgaggcctcccagaacatcacctaccactgcaagaacagcgtggcctacatggaccagcagactggcaacctcaagaaggccctgctcctccagggctccaacgagatcgagatccgcgccgagggcaacagccgcttcacctacagcgtcactgtcgatggctgcacgagtcacaccggagcctggggcaagacagtgattgaatacaaaaccaccaagacctcccgcctgcccatcatcgatgtggcccccttggacgttggtgccccagaccaggaattcggcttcgacgttggccctgtctgcttcctgtaaactccctccatcccaacctggctccctcccacccaaccaactttccccccaacccggaaacagacaagcaacccaaactgaaccccctcaaaagccaaaaaatgggagacaatttcacatggactttggaaaatatttttttcctttgcattcatctctcaaacttagtttttatctttgaccaaccgaacatgaccaaaaaccaaaagtgcattcaaccttaccaaaaaaaaaaaaaaaaaaagaataaataaataactttttaaaaaaggaagcttggtccacttgcttgaagacccatgcgggggtaagtccctttctgcccgttgggcttatgaaaccccaatgctgccctttctgctcctttctccacaccccccttggggcctcccctccactccttcccaaatctgtctccccagaagacacaggaaacaatgtattgtctgcccagcaatcaaaggcaatgctcaaacacccaagtggcccccaccctcagcccgctcctgcccgcccagcacccccaggccctgggggacctggggttctcagactgccaaagaagccttgccatctggcgctcccatggctcttgcaacatctccccttcgtttttgagggggtcatgccgggggagccaccagcccctcactgggttcggaggagagtcaggaagggccacgacaaagcagaaacatcggatttggggaacgcgtgtcaatcccttgtgccgcagggctgggcgggagagactgttctgttccttgtgtaactgtgttgctgaaagactacctcgttcttgtcttgatgtgtcaccggggcaactgcctgggggcggggatgggggcagggtggaagcggctccccattttataccaaaggtgctacatctatgtgatgggtggggtggggagggaatcactggtgctatagaaattgagatgcccccccaggccagcaaatgttcctttttgttcaaagtctatttttattccttgatatttttctttttttttttttttttttgtggatggggacttgtgaatttttctaaaggtgctatttaacatgggaggagagcgtgtgcggctccagcccagcccgctgctcactttccaccctctctccacctgcctctggcttctcaggcctctgctctccgacctctctcctctgaaaccctcctccacagctgcagcccatcctcccggctccctcctagtctgtcctgcgtcctctgtccccgggtttcagagacaacttcccaaagcacaaagcagtttttccccctaggggtgggaggaagcaaaagactctgtacctattttgtatgtgtataataatttgagatgtttttaattattttgattgctggaataaagcatgtggaaatgacccaaacataatcgtcggagcagacgggagtttctcctcggggtcggagcaggaggcacgcggagtgtgaggccacgcatgagcggacgctaaccccctccccagccacaaagagtctacatgtctagggtctagacatgttcagctttgtggacctccggctcctgctcctcttagcggccaccgccctcctgacgcacggccaagaggaaggccaagtcgagggccaagacgaagacatcccaccaatcacctgcgtacagaacggcctcaggtaccatgaccgagacgtgtggaaacccgagccctgccggatctgcgtctgcgacaacggcaaggtgttgtgcgatgacgtgatctgtgacgagaccaagaactgccccggcgccgaagtccccgagggcgagtgctgtcccgtctgccccgacggctcagagtcacccaccgaccaagaaaccaccggcgtcgagggacccaagggagacactggcccccgaggcccaaggggacccgcaggcccccctggccgagatggcatccctggacagcctggacttcccggaccccccggaccccccggacctcccggaccccctggcctcggaggaaactttgctccccagctgtcttatggctatgatgagaaatcaaccggaggaatttccgtgcctggccccatgggtccctctggtcctcgtggtctccctggcccccctggtgcacctggtccccaaggcttccaaggtccccctggtgagcctggcgagcctggagcttcaggtcccatgggtccccgaggtcccccaggtccccctggaaagaatggagatgatggggaagctggaaaacctggtcgtcctggtgagcgtgggcctcctgggcctcagggtgctcgaggattgcccggaacagctggcctccctggaatgaagggacacagaggtttcagtggtttggatggtgccaagggagatgctggtcctgctggtcctaagggtgagcctggcagccctggtgaaaatggagctcctggtcagatgggcccccgtggcctgcctggtgagagaggtcgccctggagcccctggccctgctggtgctcgtggaaatgatggtgctactggtgctgccgggccccctggtcccaccggccccgctggtcctcctggcttccctggtgctgttggtgctaagggtgaagctggtccccaagggccccgaggctctgaaggtccccagggtgtgcgtggtgagcctggcccccctggccctgctggtgctgctggccctgctggaaaccctggtgctgatggacagcctggtgctaaaggtgccaatggtgctcctggtattgctggtgctcctggcttccctggtgcccgaggcccctctggaccccagggccccggcggccctcctggtcccaagggtaacagcggtgaacctggtgctcctggcagcaaaggagacactggtgctaagggagagcctggccctgttggtgttcaaggaccccctggccctgctggagaggaaggaaagcgaggagctcgaggtgaacccggacccactggcctgcccggaccccctggcgagcgtggtggacctggtagccgtggtttccctggcgcagatggtgttgctggtcccaagggtcccgctggtgaacgtggttctcctggccctgctggccccaaaggatctcctggtgaagctggtcgtcccggtgaagctggtctgcctggtgccaagggtctgactggaagccctggcagccctggtcctgatggcaaaactggcccccctggtcccgccggtcaagatggtcgccccggacccccaggcccacctggtgcccgtggtcaggctggtgtgatgggattccctggacctaaaggtgctgctggagagcccggcaaggctggagagcgaggtgttcccggaccccctggcgctgtcggtcctgctggcaaagatggagaggctggagctcagggaccccctggccctgctggtcccgctggcgagagaggtgaacaaggccctgctggctcccccggattccagggtctccctggtcctgctggtcctccaggtgaagcaggcaaacctggtgaacagggtgttcctggagaccttggcgcccctggcccctctggagcaagaggcgagagaggtttccctggcgagcgtggtgtgcaaggtccccctggtcctgctggtccccgaggggccaacggtgctcccggcaacgatggtgctaagggtgatgctggtgcccctggagctcccggtagccagggcgcccctggccttcagggaatgcctggtgaacgtggtgcagctggtcttccagggcctaagggtgacagaggtgatgctggtcccaaaggtgctgatggctctcctggcaaagatggcgtccgtggtctgactggccccattggtcctcctggccctgctggtgcccctggtgacaagggtgaaagtggtcccagcggccctgctggtcccactggagctcgtggtgcccccggagaccgtggtgagcctggtccccccggccctgctggctttgctggcccccctggtgctgacggccaacctggtgctaaaggcgaacctggtgatgctggtgctaaaggcgatgctggtccccctggccctgccggacccgctggaccccctggccccattggtaatgttggtgctcctggagccaaaggtgctcgcggcagcgctggtccccctggtgctactggtttccctggtgctgctggccgagtcggtcctcctggcccctctggaaatgctggaccccctggccctcctggtcctgctggcaaagaaggcggcaaaggtccccgtggtgagactggccctgctggacgtcctggtgaagttggtccccctggtccccctggccctgctggcgagaaaggatcccctggtgctgatggtcctgctggtgctcctggtactcccgggcctcaaggtattgctggacagcgtggtgtggtcggcctgcctggtcagagaggagagagaggcttccctggtcttcctggcccctctggtgaacctggcaaacaaggtccctctggagcaagtggtgaacgtggtccccctggtcccatgggcccccctggattggctggaccccctggtgaatctggacgtgagggggctcctggtgccgaaggttcccctggacgagacggttctcctggcgccaagggtgaccgtggtgagaccggccccgctggaccccctggtgctcctggtgctcctggtgcccctggccccgttggccctgctggcaagagtggtgatcgtggtgagactggtcctgctggtcccaccggtcctgtcggccctgttggcgcccgtggccccgccggaccccaaggcccccgtggtgacaagggtgagacaggcgaacagggcgacagaggcataaagggtcaccgtggcttctctggcctccagggtccccctggccctcctggctctcctggtgaacaaggtccctctggagcctctggtcctgctggtccccgaggtccccctggctctgctggtgctcctggcaaagatggactcaacggtctccctggccccattgggccccctggtcctcgcggtcgcactggtgatgctggtcctgttggtccccccggccctcctggacctcctggtccccctggtcctcccagcgctggtttcgacttcagcttcctgccccagccacctcaagagaaggctcacgatggtggccgctactaccgggctgatgatgccaatgtggttcgtgaccgtgacctcgaggtggacaccaccctcaagagcctgagccagcagatcgagaacatccggagcccagagggcagccgcaagaaccccgcccgcacctgccgtgacctcaagatgtgccactctgactggaagagtggagagtactggattgaccccaaccaaggctgcaacctggatgccatcaaagtcttctgcaacatggagactggtgagacctgcgtgtaccccactcagcccagtgtggcccagaagaactggtacatcagcaagaaccccaaggacaagaggcatgtctggttcggcgagagcatgaccgatggattccagttcgagtatggcggccagggctccgaccctgccgatgtggccatccagctgaccttcctgcgcctgatgtccaccgaggcctcccagaacatcacctaccactgcaagaacagcgtggcctacatggaccagcagactggcaacctcaagaaggccctgctcctccagggctccaacgagatcgagatccgcgccgagggcaacagccgcttcacctacagcgtcactgtcgatggctgcacgagtcacaccggagcctggggcaagacagtgattgaatacaaaaccaccaagacctcccgcctgcccatcatcgatgtggcccccttggacgttggtgccccagaccaggaattcggcttcgacgttggccctgtctgcttcctgtaaactccctccatcccaacctggctccctcccacccaaccaactttccccccaacccggaaacagacaagcaacccaaactgaaccccctcaaaagccaaaaaatgggagacaatttcacatggactttggaaaatatttttttcctttgcattcatctctcaaacttagtttttatctttgaccaaccgaacatgaccaaaaaccaaaagtgcattcaaccttaccaaaaaaaaaaaaaaaaaaagaataaataaataactttttaaaaaaggaagcttggtccacttgcttgaagacccatgcgggggtaagtccctttctgcccgttgggcttatgaaaccccaatgctgccctttctgctcctttctccacaccccccttggggcctcccctccactccttcccaaatctgtctccccagaagacacaggaaacaatgtattgtctgcccagcaatcaaaggcaatgctcaaacacccaagtggcccccaccctcagcccgctcctgcccgcccagcacccccaggccctgggggacctggggttctcagactgccaaagaagccttgccatctggcgctcccatggctcttgcaacatctccccttcgtttttgagggggtcatgccgggggagccaccagcccctcactgggttcggaggagagtcaggaagggccacgacaaagcagaaacatcggatttggggaacgcgtgtcaatcccttgtgccgcagggctgggcgggagagactgttctgttccttgtgtaactgtgttgctgaaagactacctcgttcttgtcttgatgtgtcaccggggcaactgcctgggggcggggatgggggcagggtggaagcggctccccattttataccaaaggtgctacatctatgtgatgggtggggtggggagggaatcactggtgctatagaaattgagatgcccccccaggccagcaaatgttcctttttgttcaaagtctatttttattccttgatatttttctttttttttttttttttttgtggatggggacttgtgaatttttctaaaggtgctatttaacatgggaggagagcgtgtgcggctccagcccagcccgctgctcactttccaccctctctccacctgcctctggcttctcaggcctctgctctccgacctctctcctctgaaaccctcctccacagctgcagcccatcctcccggctccctcctagtctgtcctgcgtcctctgtccccgggtttcagagacaacttcccaaagcacaaagcagtttttccccctaggggtgggaggaagcaaaagactctgtacctattttgtatgtgtataataatttgagatgtttttaattattttgattgctggaataaagcatgtggaaatgacccaaacataatcgtcggagcagacgggagtttctcctcggggtcggagcaggaggcacgcggagtgtgaggccacgcatgagcggacgctaaccccctccccagccacaaagagtctacatgtctagggtctagacatgttcagctttgtggacctccggctcctgctcctcttagcggccaccgccctcctgacgcacggccaagaggaaggccaagtcgagggccaagacgaagacatcccaccaatcacctgcgtacagaacggcctcaggtaccatgaccgagacgtgtggaaacccgagccctgccggatctgcgtctgcgacaacggcaaggtgttgtgcgatgacgtgatctgtgacgagaccaagaactgccccggcgccgaagtccccgagggcgagtgctgtcccgtctgccccgacggctcagagtcacccaccgaccaagaaaccaccggcgtcgagggacccaagggagacactggcccccgaggcccaaggggacccgcaggcccccctggccgagatggcatccctggacagcctggacttcccggaccccccggaccccccggacctcccggaccccctggcctcggaggaaactttgctccccagctgtcttatggctatgatgagaaatcaaccggaggaatttccgtgcctggccccatgggtccctctggtcctcgtggtctccctggcccccctggtgcacctggtccccaaggcttccaaggtccccctggtgagcctggcgagcctggagcttcaggtcccatgggtccccgaggtcccccaggtccccctggaaagaatggagatgatggggaagctggaaaacctggtcgtcctggtgagcgtgggcctcctgggcctcagggtgctcgaggattgcccggaacagctggcctccctggaatgaagggacacagaggtttcagtggtttggatggtgccaagggagatgctggtcctgctggtcctaagggtgagcctggcagccctggtgaaaatggagctcctggtcagatgggcccccgtggcctgcctggtgagagaggtcgccctggagcccctggccctgctggtgctcgtggaaatgatggtgctactggtgctgccgggccccctggtcccaccggccccgctggtcctcctggcttccctggtgctgttggtgctaagggtgaagctggtccccaagggccccgaggctctgaaggtccccagggtgtgcgtggtgagcctggcccccctggccctgctggtgctgctggccctgctggaaaccctggtgctgatggacagcctggtgctaaaggtgccaatggtgctcctggtattgctggtgctcctggcttccctggtgcccgaggcccctctggaccccagggccccggcggccctcctggtcccaagggtaacagcggtgaacctggtgctcctggcagcaaaggagacactggtgctaagggagagcctggccctgttggtgttcaaggaccccctggccctgctggagaggaaggaaagcgaggagctcgaggtgaacccggacccactggcctgcccggaccccctggcgagcgtggtggacctggtagccgtggtttccctggcgcagatggtgttgctggtcccaagggtcccgctggtgaacgtggttctcctggccctgctggccccaaaggatctcctggtgaagctggtcgtcccggtgaagctggtctgcctggtgccaagggtctgactggaagccctggcagccctggtcctgatggcaaaactggcccccctggtcccgccggtcaagatggtcgccccggacccccaggcccacctggtgcccgtggtcaggctggtgtgatgggattccctggacctaaaggtgctgctggagagcccggcaaggctggagagcgaggtgttcccggaccccctggcgctgtcggtcctgctggcaaagatggagaggctggagctcagggaccccctggccctgctggtcccgctggcgagagaggtgaacaaggccctgctggctcccccggattccagggtctccctggtcctgctggtcctccaggtgaagcaggcaaacctggtgaacagggtgttcctggagaccttggcgcccctggcccctctggagcaagaggcgagagaggtttccctggcgagcgtggtgtgcaaggtccccctggtcctgctggtccccgaggggccaacggtgctcccggcaacgatggtgctaagggtgatgctggtgcccctggagctcccggtagccagggcgcccctggccttcagggaatgcctggtgaacgtggtgcagctggtcttccagggcctaagggtgacagaggtgatgctggtcccaaaggtgctgatggctctcctggcaaagatggcgtccgtggtctgactggccccattggtcctcctggccctgctggtgcccctggtgacaagggtgaaagtggtcccagcggccctgctggtcccactggagctcgtggtgcccccggagaccgtggtgagcctggtccccccggccctgctggctttgctggcccccctggtgctgacggccaacctggtgctaaaggcgaacctggtgatgctggtgctaaaggcgatgctggtccccctggccctgccggacccgctggaccccctggccccattggtaatgttggtgctcctggagccaaaggtgctcgcggcagcgctggtccccctggtgctactggtttccctggtgctgctggccgagtcggtcctcctggcccctctggaaatgctggaccccctggccctcctggtcctgctggcaaagaaggcggcaaaggtccccgtggtgagactggccctgctggacgtcctggtgaagttggtccccctggtccccctggccctgctggcgagaaaggatcccctggtgctgatggtcctgctggtgctcctggtactcccgggcctcaaggtattgctggacagcgtggtgtggtcggcctgcctggtcagagaggagagagaggcttccctggtcttcctggcccctctggtgaacctggcaaacaaggtccctctggagcaagtggtgaacgtggtccccctggtcccatgggcccccctggattggctggaccccctggtgaatctggacgtgagggggctcctggtgccgaaggttcccctggacgagacggttctcctggcgccaagggtgaccgtggtgagaccggccccgctggaccccctggtgctcctggtgctcctggtgcccctggccccgttggccctgctggcaagagtggtgatcgtggtgagactggtcctgctggtcccaccggtcctgtcggccctgttggcgcccgtggccccgccggaccccaaggcccccgtggtgacaagggtgagacaggcgaacagggcgacagaggcataaagggtcaccgtggcttctctggcctccagggtccccctggccctcctggctctcctggtgaacaaggtccctctggagcctctggtcctgctggtccccgaggtccccctggctctgctggtgctcctggcaaagatggactcaacggtctccctggccccattgggccccctggtcctcgcggtcgcactggtgatgctggtcctgttggtccccccggccctcctggacctcctggtccccctggtcctcccagcgctggtttcgacttcagcttcctgccccagccacctcaagagaaggctcacgatggtggccgctactaccgggctgatgatgccaatgtggttcgtgaccgtgacctcgaggtggacaccaccctcaagagcctgagccagcagatcgagaacatccggagcccagagggcagccgcaagaaccccgcccgcacctgccgtgacctcaagatgtgccactctgactggaagagtggagagtactggattgaccccaaccaaggctgcaacctggatgccatcaaagtcttctgcaacatggagactggtgagacctgcgtgtaccccactcagcccagtgtggcccagaagaactggtacatcagcaagaaccccaaggacaagaggcatgtctggttcggcgagagcatgaccgatggattccagttcgagtatggcggccagggctccgaccctgccgatgtggccatccagctgaccttcctgcgcctgatgtccaccgaggcctcccagaacatcacctaccactgcaagaacagcgtggcctacatggaccagcagactggcaacctcaagaaggccctgctcctccagggctccaacgagatcgagatccgcgccgagggcaacagccgcttcacctacagcgtcactgtcgatggctgcacgagtcacaccggagcctggggcaagacagtgattgaatacaaaaccaccaagacctcccgcctgcccatcatcgatgtggcccccttggacgttggtgccccagaccaggaattcggcttcgacgttggccctgtctgcttcctgtaaactccctccatcccaacctggctccctcccacccaaccaactttccccccaacccggaaacagacaagcaacccaaactgaaccccctcaaaagccaaaaaatgggagacaatttcacatggactttggaaaatatttttttcctttgcattcatctctcaaacttagtttttatctttgaccaaccgaacatgaccaaaaaccaaaagtgcattcaaccttaccaaaaaaaaaaaaaaaaaaagaataaataaataactttttaaaaaaggaagcttggtccacttgcttgaagacccatgcgggggtaagtccctttctgcccgttgggcttatgaaaccccaatgctgccctttctgctcctttctccacaccccccttggggcctcccctccactccttcccaaatctgtctccccagaagacacaggaaacaatgtattgtctgcccagcaatcaaaggcaatgctcaaacacccaagtggcccccaccctcagcccgctcctgcccgcccagcacccccaggccctgggggacctggggttctcagactgccaaagaagccttgccatctggcgctcccatggctcttgcaacatctccccttcgtttttgagggggtcatgccgggggagccaccagcccctcactgggttcggaggagagtcaggaagggccacgacaaagcagaaacatcggatttggggaacgcgtgtcaatcccttgtgccgcagggctgggcgggagagactgttctgttccttgtgtaactgtgttgctgaaagactacctcgttcttgtcttgatgtgtcaccggggcaactgcctgggggcggggatgggggcagggtggaagcggctccccattttataccaaaggtgctacatctatgtgatgggtggggtggggagggaatcactggtgctatagaaattgagatgcccccccaggccagcaaatgttcctttttgttcaaagtctatttttattccttgatatttttctttttttttttttttttttgtggatggggacttgtgaatttttctaaaggtgctatttaacatgggaggagagcgtgtgcggctccagcccagcccgctgctcactttccaccctctctccacctgcctctggcttctcaggcctctgctctccgacctctctcctctgaaaccctcctccacagctgcagcccatcctcccggctccctcctagtctgtcctgcgtcctctgtccccgggtttcagagacaacttcccaaagcacaaagcagtttttccccctaggggtgggaggaagcaaaagactctgtacctattttgtatgtgtataataatttgagatgtttttaattattttgattgctggaataaagcatgtggaaatgacccaaacataatcgtcggagcagacgggagtttctcctcggggtcggagcaggaggcacgcggagtgtgaggccacgcatgagcggacgctaaccccctccccagccacaaagagtctacatgtctagggtctagacatgttcagctttgtggacctccggctcctgctcctcttagcggccaccgccctcctgacgcacggccaagaggaaggccaagtcgagggccaagacgaagacatcccaccaatcacctgcgtacagaacggcctcaggtaccatgaccgagacgtgtggaaacccgagccctgccggatctgcgtctgcgacaacggcaaggtgttgtgcgatgacgtgatctgtgacgagaccaagaactgccccggcgccgaagtccccgagggcgagtgctgtcccgtctgccccgacggctcagagtcacccaccgaccaagaaaccaccggcgtcgagggacccaagggagacactggcccccgaggcccaaggggacccgcaggcccccctggccgagatggcatccctggacagcctggacttcccggaccccccggaccccccggacctcccggaccccctggcctcggaggaaactttgctccccagctgtcttatggctatgatgagaaatcaaccggaggaatttccgtgcctggccccatgggtccctctggtcctcgtggtctccctggcccccctggtgcacctggtccccaaggcttccaaggtccccctggtgagcctggcgagcctggagcttcaggtcccatgggtccccgaggtcccccaggtccccctggaaagaatggagatgatggggaagctggaaaacctggtcgtcctggtgagcgtgggcctcctgggcctcagggtgctcgaggattgcccggaacagctggcctccctggaatgaagggacacagaggtttcagtggtttggatggtgccaagggagatgctggtcctgctggtcctaagggtgagcctggcagccctggtgaaaatggagctcctggtcagatgggcccccgtggcctgcctggtgagagaggtcgccctggagcccctggccctgctggtgctcgtggaaatgatggtgctactggtgctgccgggccccctggtcccaccggccccgctggtcctcctggcttccctggtgctgttggtgctaagggtgaagctggtccccaagggccccgaggctctgaaggtccccagggtgtgcgtggtgagcctggcccccctggccctgctggtgctgctggccctgctggaaaccctggtgctgatggacagcctggtgctaaaggtgccaatggtgctcctggtattgctggtgctcctggcttccctggtgcccgaggcccctctggaccccagggccccggcggccctcctggtcccaagggtaacagcggtgaacctggtgctcctggcagcaaaggagacactggtgctaagggagagcctggccctgttggtgttcaaggaccccctggccctgctggagaggaaggaaagcgaggagctcgaggtgaacccggacccactggcctgcccggaccccctggcgagcgtggtggacctggtagccgtggtttccctggcgcagatggtgttgctggtcccaagggtcccgctggtgaacgtggttctcctggccctgctggccccaaaggatctcctggtgaagctggtcgtcccggtgaagctggtctgcctggtgccaagggtctgactggaagccctggcagccctggtcctgatggcaaaactggcccccctggtcccgccggtcaagatggtcgccccggacccccaggcccacctggtgcccgtggtcaggctggtgtgatgggattccctggacctaaaggtgctgctggagagcccggcaaggctggagagcgaggtgttcccggaccccctggcgctgtcggtcctgctggcaaagatggagaggctggagctcagggaccccctggccctgctggtcccgctggcgagagaggtgaacaaggccctgctggctcccccggattccagggtctccctggtcctgctggtcctccaggtgaagcaggcaaacctggtgaacagggtgttcctggagaccttggcgcccctggcccctctggagcaagaggcgagagaggtttccctggcgagcgtggtgtgcaaggtccccctggtcctgctggtccccgaggggccaacggtgctcccggcaacgatggtgctaagggtgatgctggtgcccctggagctcccggtagccagggcgcccctggccttcagggaatgcctggtgaacgtggtgcagctggtcttccagggcctaagggtgacagaggtgatgctggtcccaaaggtgctgatggctctcctggcaaagatggcgtccgtggtctgactggccccattggtcctcctggccctgctggtgcccctggtgacaagggtgaaagtggtcccagcggccctgctggtcccactggagctcgtggtgcccccggagaccgtggtgagcctggtccccccggccctgctggctttgctggcccccctggtgctgacggccaacctggtgctaaaggcgaacctggtgatgctggtgctaaaggcgatgctggtccccctggccctgccggacccgctggaccccctggccccattggtaatgttggtgctcctggagccaaaggtgctcgcggcagcgctggtccccctggtgctactggtttccctggtgctgctggccgagtcggtcctcctggcccctctggaaatgctggaccccctggccctcctggtcctgctggcaaagaaggcggcaaaggtccccgtggtgagactggccctgctggacgtcctggtgaagttggtccccctggtccccctggccctgctggcgagaaaggatcccctggtgctgatggtcctgctggtgctcctggtactcccgggcctcaaggtattgctggacagcgtggtgtggtcggcctgcctggtcagagaggagagagaggcttccctggtcttcctggcccctctggtgaacctggcaaacaaggtccctctggagcaagtggtgaacgtggtccccctggtcccatgggcccccctggattggctggaccccctggtgaatctggacgtgagggggctcctggtgccgaaggttcccctggacgagacggttctcctggcgccaagggtgaccgtggtgagaccggccccgctggaccccctggtgctcctggtgctcctggtgcccctggccccgttggccctgctggcaagagtggtgatcgtggtgagactggtcctgctggtcccaccggtcctgtcggccctgttggcgcccgtggccccgccggaccccaaggcccccgtggtgacaagggtgagacaggcgaacagggcgacagaggcataaagggtcaccgtggcttctctggcctccagggtccccctggccctcctggctctcctggtgaacaaggtccctctggagcctctggtcctgctggtccccgaggtccccctggctctgctggtgctcctggcaaagatggactcaacggtctccctggccccattgggccccctggtcctcgcggtcgcactggtgatgctggtcctgttggtccccccggccctcctggacctcctggtccccctggtcctcccagcgctggtttcgacttcagcttcctgccccagccacctcaagagaaggctcacgatggtggccgctactaccgggctgatgatgccaatgtggttcgtgaccgtgacctcgaggtggacaccaccctcaagagcctgagccagcagatcgagaacatccggagcccagagggcagccgcaagaaccccgcccgcacctgccgtgacctcaagatgtgccactctgactggaagagtggagagtactggattgaccccaaccaaggctgcaacctggatgccatcaaagtcttctgcaacatggagactggtgagacctgcgtgtaccccactcagcccagtgtggcccagaagaactggtacatcagcaagaaccccaaggacaagaggcatgtctggttcggcgagagcatgaccgatggattccagttcgagtatggcggccagggctccgaccctgccgatgtggccatccagctgaccttcctgcgcctgatgtccaccgaggcctcccagaacatcacctaccactgcaagaacagcgtggcctacatggaccagcagactggcaacctcaagaaggccctgctcctccagggctccaacgagatcgagatccgcgccgagggcaacagccgcttcacctacagcgtcactgtcgatggctgcacgagtcacaccggagcctggggcaagacagtgattgaatacaaaaccaccaagacctcccgcctgcccatcatcgatgtggcccccttggacgttggtgccccagaccaggaattcggcttcgacgttggccctgtctgcttcctgtaaactccctccatcccaacctggctccctcccacccaaccaactttccccccaacccggaaacagacaagcaacccaaactgaaccccctcaaaagccaaaaaatgggagacaatttcacatggactttggaaaatatttttttcctttgcattcatctctcaaacttagtttttatctttgaccaaccgaacatgaccaaaaaccaaaagtgcattcaaccttaccaaaaaaaaaaaaaaaaaaagaataaataaataactttttaaaaaaggaagcttggtccacttgcttgaagacccatgcgggggtaagtccctttctgcccgttgggcttatgaaaccccaatgctgccctttctgctcctttctccacaccccccttggggcctcccctccactccttcccaaatctgtctccccagaagacacaggaaacaatgtattgtctgcccagcaatcaaaggcaatgctcaaacacccaagtggcccccaccctcagcccgctcctgcccgcccagcacccccaggccctgggggacctggggttctcagactgccaaagaagccttgccatctggcgctcccatggctcttgcaacatctccccttcgtttttgagggggtcatgccgggggagccaccagcccctcactgggttcggaggagagtcaggaagggccacgacaaagcagaaacatcggatttggggaacgcgtgtcaatcccttgtgccgcagggctgggcgggagagactgttctgttccttgtgtaactgtgttgctgaaagactacctcgttcttgtcttgatgtgtcaccggggcaactgcctgggggcggggatgggggcagggtggaagcggctccccattttataccaaaggtgctacatctatgtgatgggtggggtggggagggaatcactggtgctatagaaattgagatgcccccccaggccagcaaatgttcctttttgttcaaagtctatttttattccttgatatttttctttttttttttttttttttgtggatggggacttgtgaatttttctaaaggtgctatttaacatgggaggagagcgtgtgcggctccagcccagcccgctgctcactttccaccctctctccacctgcctctggcttctcaggcctctgctctccgacctctctcctctgaaaccctcctccacagctgcagcccatcctcccggctccctcctagtctgtcctgcgtcctctgtccccgggtttcagagacaacttcccaaagcacaaagcagtttttccccctaggggtgggaggaagcaaaagactctgtacctattttgtatgtgtataataatttgagatgtttttaattattttgattgctggaataaagcatgtggaaatgacccaaacataatcgtcggagcagacgggagtttctcctcggggtcggagcaggaggcacgcggagtgtgaggccacgcatgagcggacgctaaccccctccccagccacaaagagtctacatgtctagggtctagacatgttcagctttgtggacctccggctcctgctcctcttagcggccaccgccctcctgacgcacggccaagaggaaggccaagtcgagggccaagacgaagacatcccaccaatcacctgcgtacagaacggcctcaggtaccatgaccgagacgtgtggaaacccgagccctgccggatctgcgtctgcgacaacggcaaggtgttgtgcgatgacgtgatctgtgacgagaccaagaactgccccggcgccgaagtccccgagggcgagtgctgtcccgtctgccccgacggctcagagtcacccaccgaccaagaaaccaccggcgtcgagggacccaagggagacactggcccccgaggcccaaggggacccgcaggcccccctggccgagatggcatccctggacagcctggacttcccggaccccccggaccccccggacctcccggaccccctggcctcggaggaaactttgctccccagctgtcttatggctatgatgagaaatcaaccggaggaatttccgtgcctggccccatgggtccctctggtcctcgtggtctccctggcccccctggtgcacctggtccccaaggcttccaaggtccccctggtgagcctggcgagcctggagcttcaggtcccatgggtccccgaggtcccccaggtccccctggaaagaatggagatgatggggaagctggaaaacctggtcgtcctggtgagcgtgggcctcctgggcctcagggtgctcgaggattgcccggaacagctggcctccctggaatgaagggacacagaggtttcagtggtttggatggtgccaagggagatgctggtcctgctggtcctaagggtgagcctggcagccctggtgaaaatggagctcctggtcagatgggcccccgtggcctgcctggtgagagaggtcgccctggagcccctggccctgctggtgctcgtggaaatgatggtgctactggtgctgccgggccccctggtcccaccggccccgctggtcctcctggcttccctggtgctgttggtgctaagggtgaagctggtccccaagggccccgaggctctgaaggtccccagggtgtgcgtggtgagcctggcccccctggccctgctggtgctgctggccctgctggaaaccctggtgctgatggacagcctggtgctaaaggtgccaatggtgctcctggtattgctggtgctcctggcttccctggtgcccgaggcccctctggaccccagggccccggcggccctcctggtcccaagggtaacagcggtgaacctggtgctcctggcagcaaaggagacactggtgctaagggagagcctggccctgttggtgttcaaggaccccctggccctgctggagaggaaggaaagcgaggagctcgaggtgaacccggacccactggcctgcccggaccccctggcgagcgtggtggacctggtagccgtggtttccctggcgcagatggtgttgctggtcccaagggtcccgctggtgaacgtggttctcctggccctgctggccccaaaggatctcctggtgaagctggtcgtcccggtgaagctggtctgcctggtgccaagggtctgactggaagccctggcagccctggtcctgatggcaaaactggcccccctggtcccgccggtcaagatggtcgccccggacccccaggcccacctggtgcccgtggtcaggctggtgtgatgggattccctggacctaaaggtgctgctggagagcccggcaaggctggagagcgaggtgttcccggaccccctggcgctgtcggtcctgctggcaaagatggagaggctggagctcagggaccccctggccctgctggtcccgctggcgagagaggtgaacaaggccctgctggctcccccggattccagggtctccctggtcctgctggtcctccaggtgaagcaggcaaacctggtgaacagggtgttcctggagaccttggcgcccctggcccctctggagcaagaggcgagagaggtttccctggcgagcgtggtgtgcaaggtccccctggtcctgctggtc

SEQ ID NO: 823 - DNA, 32765 bp, Homo sapiens
  misc_feature (756)..(756): second gene starts at position 756
atggatgattttgagcgtcgcagagaacttagaaggcaaaagagggaggagatgcgactcgaagcagaaagaatcgcctaccagaggaatgacgatgatgaagaggaggcagcccgggaacggcgccgccgagcccgacaggaacggctgcggcagaagcaggaggaagaatccttgggacaggtgaccgaccaggtggaggtgaatgcccagaacagtgtgcctgacgaggaggccaagacaaccaccacaaacactcaagtggaaggggatgatgaggccgcattcctggagcgcctggctcggcgtgaggaaagacgccaaaaacgccttcaggaggctctggagcggcagaaggagttcgacccaacaataacagatgcaagtctgtcgctcccaagcagaagaatgcaaaatgacacagcagaaaatgaaactaccgagaaggaagaaaaaagtgaaagtcgccaagaaagatacgagatagaggaaacagaaacagtcaccaagtcctaccagaagaatgattggagggatgctgaagaaaacaagaaagaagacaaggaaaaggaggaggaggaagaggagaagccaaagcgagggagcattggagaaaatcaggtagaggtgatggtggaagagaaaacaactgaaagccaggaggaaacagtggtaatgtcattaaaaaatgggcagatcagttcagaagagcctaaacaagaggaggagagggaacaaggttcagatgagatttcccatcatgaaaagatggaagaggaagacaaggaaagagctgaggcagagagggcaaggttggaagcagaagaaagagaaagaattaaagccgagcaagacaaaaagatagcagatgaacgagcaagaattgaagcagaagaaaaagcagctgcccaagaaagagaaaggagagaggcagaagagagggaaaggatgagggaggaagagaaaagggcagcagaggagaggcagaggataaaggaggaagagaaaagggcagcagaggagaggcagaggataaaggaggaagagaaaagggcagcagaggagaggcagaggataaaagaggaagagaaaagggcagcagaggagaggcaaagggccagggcagaggaggaagagaaggctaaggtagaagagcagaaacgtaacaagcagctagaagagaaaaaacatgccatgcaagagacaaagataaaaggggaaaaggtagaacagaaaatagaagggaaatgggtaaatgaaaagaaagcacaagaagataaacttcagacagctgtcctaaagaaacagggagaagagaagggaactaaagtgcaagctaaaagagaaaagctccaagaagacaagcctaccttcaaaaaagaagagatcaaagatgaaaagattaaaaaggacaaagaacccaaagaagaagttaagagcttcatggatcgaaagaagggatttacagaagttaagtcgcagaatggagaattcatgacccacaaacttaaacatactgagaatactttcagccgccctggagggagggccagcgtggacaccaaggaggctgagggcgccccccaggtggaagccggcaaaaggctggaggagcttcgtcgtcgtcgcggggagaccgagagcgaagagttcgagaagctcaaacagaagcagcaggaggcggctttggagctggaggaactcaagaaaaagagggaggagagaaggaaggtcctggaggaggaagagcagaggctcctgctcctcttagcggccaccgccctcctgacgcacggccaagaggaaggccaagtcgagggccaagacgaagacatcccaccaatcacctgcgtacagaacggcctcaggtaccatgaccgagacgtgtggaaacccgagccctgccggatctgcgtctgcgacaacggcaaggtgttgtgcgatgacgtgatctgtgacgagaccaagaactgccccggcgccgaagtccccgagggcgagtgctgtcccgtctgccccgacggctcagagtcacccaccgaccaagaaaccaccggcgtcgagggacccaagggagacactggcccccgaggcccaaggggacccgcaggcccccctggccgagatggcatccctggacagcctggacttcccggaccccccggaccccccggacctcccggaccccctggcctcggaggaaactttgctccccagctgtcttatggctatgatgagaaatcaaccggaggaatttccgtgcctggccccatgggtccctctggtcctcgtggtctccctggcccccctggtgcacctggtccccaaggcttccaaggtccccctggtgagcctggcgagcctggagcttcaggtcccatgggtccccgaggtcccccaggtccccctggaaagaatggagatgatggggaagctggaaaacctggtcgtcctggtgagcgtgggcctcctgggcctcagggtgctcgaggattgcccggaacagctggcctccctggaatgaagggacacagaggtttcagtggtttggatggtgccaagggagatgctggtcctgctggtcctaagggtgagcctggcagccctggtgaaaatggagctcctggtcagatgggcccccgtggcctgcctggtgagagaggtcgccctggagcccctggccctgctggtgctcgtggaaatgatggtgctactggtgctgccgggccccctggtcccaccggccccgctggtcctcctggcttccctggtgctgttggtgctaagggtgaagctggtccccaagggccccgaggctctgaaggtccccagggtgtgcgtggtgagcctggcccccctggccctgctggtgctgctggccctgctggaaaccctggtgctgatggacagcctggtgctaaaggtgccaatggtgctcctggtattgctggtgctcctggcttccctggtgcccgaggcccctctggaccccagggccccggcggccctcctggtcccaagggtaacagcggtgaacctggtgctcctggcagcaaaggagacactggtgctaagggagagcctggccctgttggtgttcaaggaccccctggccctgctggagaggaaggaaagcgaggagctcgaggtgaacccggacccactggcctgcccggaccccctggcgagcgtggtggacctggtagccgtggtttccctggcgcagatggtgttgctggtcccaagggtcccgctggtgaacgtggttctcctggccctgctggccccaaaggatctcctggtgaagctggtcgtcccggtgaagctggtctgcctggtgccaagggtctgactggaagccctggcagccctggtcctgatggcaaaactggcccccctggtcccgccggtcaagatggtcgccccggacccccaggcccacctggtgcccgtggtcaggctggtgtgatgggattccctggacctaaaggtgctgctggagagcccggcaaggctggagagcgaggtgttcccggaccccctggcgctgtcggtcctgctggcaaagatggagaggctggagctcagggaccccctggccctgctggtcccgctggcgagagaggtgaacaaggccctgctggctcccccggattccagggtctccctggtcctgctggtcctccaggtgaagcaggcaaacctggtgaacagggtgttcctggagaccttggcgcccctggcccctctggagcaagaggcgagagaggtttccctggcgagcgtggtgtgcaaggtccccctggtcctgctggtccccgaggggccaacggtgctcccggcaacgatggtgctaagggtgatgctggtgcccctggagctcccggtagccagggcgcccctggccttcagggaatgcctggtgaacgtggtgcagctggtcttccagggcctaagggtgacagaggtgatgctggtcccaaaggtgctgatggctctcctggcaaagatggcgtccgtggtctgactggccccattggtcctcctggccctgctggtgcccctggtgacaagggtgaaagtggtcccagcggccctgctggtcccactggagctcgtggtgcccccggagaccgtggtgagcctggtccccccggccctgctggctttgctggcccccctggtgctgacggccaacctggtgctaaaggcgaacctggtgatgctggtgctaaaggcgatgctggtccccctggccctgccggacccgctggaccccctggccccattggtaatgttggtgctcctggagccaaaggtgctcgcggcagcgctggtccccctggtgctactggtttccctggtgctgctggccgagtcggtcctcctggcccctctggaaatgctggaccccctggccctcctggtcctgctggcaaagaaggcggcaaaggtccccgtggtgagactggccctgctggacgtcctggtgaagttggtccccctggtccccctggccctgctggcgagaaaggatcccctggtgctgatggtcctgctggtgctcctggtactcccgggcctcaaggtattgctggacagcgtggtgtggtcggcctgcctggtcagagaggagagagaggcttccctggtcttcctggcccctctggtgaacctggcaaacaaggtccctctggagcaagtggtgaacgtggtccccctggtcccatgggcccccctggattggctggaccccctggtgaatctggacgtgagggggctcctggtgccgaaggttcccctggacgagacggttctcctggcgccaagggtgaccgtggtgagaccggccccgctggaccccctggtgctcctggtgctcctggtgcccctggccccgttggccctgctggcaagagtggtgatcgtggtgagactggtcctgctggtcccaccggtcctgtcggccctgttggcgcccgtggccccgccggaccccaaggcccccgtggtgacaagggtgagacaggcgaacagggcgacagaggcataaagggtcaccgtggcttctctggcctccagggtccccctggccctcctggctctcctggtgaacaaggtccctctggagcctctggtcctgctggtccccgaggtccccctggctctgctggtgctcctggcaaagatggactcaacggtctccctggccccattgggccccctggtcctcgcggtcgcactggtgatgctggtcctgttggtccccccggccctcctggacctcctggtccccctggtcctcccagcgctggtttcgacttcagcttcctgccccagccacctcaagagaaggctcacgatggtggccgctactaccgggctgatgatgccaatgtggttcgtgaccgtgacctcgaggtggacaccaccctcaagagcctgagccagcagatcgagaacatccggagcccagagggcagccgcaagaaccccgcccgcacctgccgtgacctcaagatgtgccactctgactggaagagtggagagtactggattgaccccaaccaaggctgcaacctggatgccatcaaagtcttctgcaacatggagactggtgagacctgcgtgtaccccactcagcccagtgtggcccagaagaactggtacatcagcaagaaccccaaggacaagaggcatgtctggttcggcgagagcatgaccgatggattccagttcgagtatggcggccagggctccgaccctgccgatgtggccatccagctgaccttcctgcgcctgatgtccaccgaggcctcccagaacatcacctaccactgcaagaacagcgtggcctacatggaccagcagactggcaacctcaagaaggccctgctcctccagggctccaacgagatcgagatccgcgccgagggcaacagccgcttcacctacagcgtcactgtcgatggctgcacgagtcacaccggagcctggggcaagacagtgattgaatacaaaaccaccaagacctcccgcctgcccatcatcgatgtggcccccttggacgttggtgccccagaccaggaattcggcttcgacgttggccctgtctgcttcctgtaaactccctccatcccaacctggctccctcccacccaaccaactttccccccaacccggaaacagacaagcaacccaaactgaaccccctcaaaagccaaaaaatgggagacaatttcacatggactttggaaaatatttttttcctttgcattcatctctcaaacttagtttttatctttgaccaaccgaacatgaccaaaaaccaaaagtgcattcaaccttaccaaaaaaaaaaaaaaaaaaagaataaataaataactttttaaaaaaggaagcttggtccacttgcttgaagacccatgcgggggtaagtccctttctgcccgttgggcttatgaaaccccaatgctgccctttctgctcctttctccacaccccccttggggcctcccctccactccttcccaaatctgtctccccagaagacacaggaaacaatgtattgtctgcccagcaatcaaaggcaatgctcaaacacccaagtggcccccaccctcagcccgctcctgcccgcccagcacccccaggccctgggggacctggggttctcagactgccaaagaagccttgccatctggcgctcccatggctcttgcaacatctccccttcgtttttgagggggtcatgccgggggagccaccagcccctcactgggttcggaggagagtcaggaagggccacgacaaagcagaaacatcggatttggggaacgcgtgtcaatcccttgtgccgcagggctgggcgggagagactgttctgttccttgtgtaactgtgttgctgaaagactacctcgttcttgtcttgatgtgtcaccggggcaactgcctgggggcggggatgggggcagggtggaagcggctccccattttataccaaaggtgctacatctatgtgatgggtggggtggggagggaatcactggtgctatagaaattgagatgcccccccaggccagcaaatgttcctttttgttcaaagtctatttttattccttgatatttttctttttttttttttttttttgtggatggggacttgtgaatttttctaaaggtgctatttaacatgggaggagagcgtgtgcggctccagcccagcccgctgctcactttccaccctctctccacctgcctctggcttctcaggcctctgctctccgacctctctcctctgaaaccctcctccacagctgcagcccatcctcccggctccctcctagtctgtcctgcgtcctctgtccccgggtttcagagacaacttcccaaagcacaaagcagtttttccccctaggggtgggaggaagcaaaagactctgtacctattttgtatgtgtataataatttgagatgtttttaattattttgattgctggaataaagcatgtggaaatgacccaaacataatcgtcggagcagacgggagtttctcctcggggtcggagcaggaggcacgcggagtgtgaggccacgcatgagcggacgctaaccccctccccagccacaaagagtctacatgtctagggtctagacatgttcagctttgtggacctccggctcctgctcctcttagcggccaccgccctcctgacgcacggccaagaggaaggccaagtcgagggccaagacgaagacatcccaccaatcacctgcgtacagaacggcctcaggtaccatgaccgagacgtgtggaaacccgagccctgccggatctgcgtctgcgacaacggcaaggtgttgtgcgatgacgtgatctgtgacgagaccaagaactgccccggcgccgaagtccccgagggcgagtgctgtcccgtctgccccgacggctcagagtcacccaccgaccaagaaaccaccggcgtcgagggacccaagggagacactggcccccgaggcccaaggggacccgcaggcccccctggccgagatggcatccctggacagcctggacttcccggaccccccggaccccccggacctcccggaccccctggcctcggaggaaactttgctccccagctgtcttatggctatgatgagaaatcaaccggaggaatttccgtgcctggccccatgggtccctctggtcctcgtggtctccctggcccccctggtgcacctggtccccaaggcttccaaggtccccctggtgagcctggcgagcctggagcttcaggtcccatgggtccccgaggtcccccaggtccccctggaaagaatggagatgatggggaagctggaaaacctggtcgtcctggtgagcgtgggcctcctgggcctcagggtgctcgaggattgcccggaacagctggcctccctggaatgaagggacacagaggtttcagtggtttggatggtgccaagggagatgctggtcctgctggtcctaagggtgagcctggcagccctggtgaaaatggagctcctggtcagatgggcccccgtggcctgcctggtgagagaggtcgccctggagcccctggccctgctggtgctcgtggaaatgatggtgctactggtgctgccgggccccctggtcccaccggccccgctggtcctcctggcttccctggtgctgttggtgctaagggtgaagctggtccccaagggccccgaggctctgaaggtccccagggtgtgcgtggtgagcctggcccccctggccctgctggtgctgctggccctgctggaaaccctggtgctgatggacagcctggtgctaaaggtgccaatggtgctcctggtattgctggtgctcctggcttccctggtgcccgaggcccctctggaccccagggccccggcggccctcctggtcccaagggtaacagcggtgaacctggtgctcctggcagcaaaggagacactggtgctaagggagagcctggccctgttggtgttcaaggaccccctggccctgctggagaggaaggaaagcgaggagctcgaggtgaacccggacccactggcctgcccggaccccctggcgagcgtggtggacctggtagccgtggtttccctggcgcagatggtgttgctggtcccaagggtcccgctggtgaacgtggttctcctggccctgctggccccaaaggatctcctggtgaagctggtcgtcccggtgaagctggtctgcctggtgccaagggtctgactggaagccctggcagccctggtcctgatggcaaaactggcccccctggtcccgccggtcaagatggtcgccccggacccccaggcccacctggtgcccgtggtcaggctggtgtgatgggattccctggacctaaaggtgctgctggagagcccggcaaggctggagagcgaggtgttcccggaccccctggcgctgtcggtcctgctggcaaagatggagaggctggagctcagggaccccctggccctgctggtcccgctggcgagagaggtgaacaaggccctgctggctcccccggattccagggtctccctggtcctgctggtcctccaggtgaagcaggcaaacctggtgaacagggtgttcctggagaccttggcgcccctggcccctctggagcaagaggcgagagaggtttccctggcgagcgtggtgtgcaaggtccccctggtcctgctggtccccgaggggccaacggtgctcccggcaacgatggtgctaagggtgatgctggtgcccctggagctcccggtagccagggcgcccctggccttcagggaatgcctggtgaacgtggtgcagctggtcttccagggcctaagggtgacagaggtgatgctggtcccaaaggtgctgatggctctcctggcaaagatggcgtccgtggtctgactggccccattggtcctcctggccctgctggtgcccctggtgacaagggtgaaagtggtcccagcggccctgctggtcccactggagctcgtggtgcccccggagaccgtggtgagcctggtccccccggccctgctggctttgctggcccccctggtgctgacggccaacctggtgctaaaggcgaacctggtgatgctggtgctaaaggcgatgctggtccccctggccctgccggacccgctggaccccctggccccattggtaatgttggtgctcctggagccaaaggtgctcgcggcagcgctggtccccctggtgctactggtttccctggtgctgctggccgagtcggtcctcctggcccctctggaaatgctggaccccctggccctcctggtcctgctggcaaagaaggcggcaaaggtccccgtggtgagactggccctgctggacgtcctggtgaagttggtccccctggtccccctggccctgctggcgagaaaggatcccctggtgctgatggtcctgctggtgctcctggtactcccgggcctcaaggtattgctggacagcgtggtgtggtcggcctgcctggtcagagaggagagagaggcttccctggtcttcctggcccctctggtgaacctggcaaacaaggtccctctggagcaagtggtgaacgtggtccccctggtcccatgggcccccctggattggctggaccccctggtgaatctggacgtgagggggctcctggtgccgaaggttcccctggacgagacggttctcctggcgccaagggtgaccgtggtgagaccggccccgctggaccccctggtgctcctggtgctcctggtgcccctggccccgttggccctgctggcaagagtggtgatcgtggtgagactggtcctgctggtcccaccggtcctgtcggccctgttggcgcccgtggccccgccggaccccaaggcccccgtggtgacaagggtgagacaggcgaacagggcgacagaggcataaagggtcaccgtggcttctctggcctccagggtccccctggccctcctggctctcctggtgaacaaggtccctctggagcctctggtcctgctggtccccgaggtccccctggctctgctggtgctcctggcaaagatggactcaacggtctccctggccccattgggccccctggtcctcgcggtcgcactggtgatgctggtcctgttggtccccccggccctcctggacctcctggtccccctggtcctcccagcgctggtttcgacttcagcttcctgccccagccacctcaagagaaggctcacgatggtggccgctactaccgggctgatgatgccaatgtggttcgtgaccgtgacctcgaggtggacaccaccctcaagagcctgagccagcagatcgagaacatccggagcccagagggcagccgcaagaaccccgcccgcacctgccgtgacctcaagatgtgccactctgactggaagagtggagagtactggattgaccccaaccaaggctgcaacctggatgccatcaaagtcttctgcaacatggagactggtgagacctgcgtgtaccccactcagcccagtgtggcccagaagaactggtacatcagcaagaaccccaaggacaagaggcatgtctggttcggcgagagcatgaccgatggattccagttcgagtatggcggccagggctccgaccctgccgatgtggccatccagctgaccttcctgcgcctgatgtccaccgaggcctcccagaacatcacctaccactgcaagaacagcgtggcctacatggaccagcagactggcaacctcaagaaggccctgctcctccagggctccaacgagatcgagatccgcgccgagggcaacagccgcttcacctacagcgtcactgtcgatggctgcacgagtcacaccggagcctggggcaagacagtgattgaatacaaaaccaccaagacctcccgcctgcccatcatcgatgtggcccccttggacgttggtgccccagaccaggaattcggcttcgacgttggccctgtctgcttcctgtaaactccctccatcccaacctggctccctcccacccaaccaactttccccccaacccggaaacagacaagcaacccaaactgaaccccctcaaaagccaaaaaatgggagacaatttcacatggactttggaaaatatttttttcctttgcattcatctctcaaacttagtttttatctttgaccaaccgaacatgaccaaaaaccaaaagtgcattcaaccttaccaaaaaaaaaaaaaaaaaaagaataaataaataactttttaaaaaaggaagcttggtccacttgcttgaagacccatgcgggggtaagtccctttctgcccgttgggcttatgaaaccccaatgctgccctttctgctcctttctccacaccccccttggggcctcccctccactccttcccaaatctgtctccccagaagacacaggaaacaatgtattgtctgcccagcaatcaaaggcaatgctcaaacacccaagtggcccccaccctcagcccgctcctgcccgcccagcacccccaggccctgggggacctggggttctcagactgccaaagaagccttgccatctggcgctcccatggctcttgcaacatctccccttcgtttttgagggggtcatgccgggggagccaccagcccctcactgggttcggaggagagtcaggaagggccacgacaaagcagaaacatcggatttggggaacgcgtgtcaatcccttgtgccgcagggctgggcgggagagactgttctgttccttgtgtaactgtgttgctgaaagactacctcgttcttgtcttgatgtgtcaccggggcaactgcctgggggcggggatgggggcagggtggaagcggctccccattttataccaaaggtgctacatctatgtgatgggtggggtggggagggaatcactggtgctatagaaattgagatgcccccccaggccagcaaatgttcctttttgttcaaagtctatttttattccttgatatttttctttttttttttttttttttgtggatggggacttgtgaatttttctaaaggtgctatttaacatgggaggagagcgtgtgcggctccagcccagcccgctgctcactttccaccctctctccacctgcctctggcttctcaggcctctgctctccgacctctctcctctgaaaccctcctccacagctgcagcccatcctcccggctccctcctagtctgtcctgcgtcctctgtccccgggtttcagagacaacttcccaaagcacaaagcagtttttccccctaggggtgggaggaagcaaaagactctgtacctattttgtatgtgtataataatttgagatgtttttaattattttgattgctggaataaagcatgtggaaatgacccaaacataatcgtcggagcagacgggagtttctcctcggggtcggagcaggaggcacgcggagtgtgaggccacgcatgagcggacgctaaccccctccccagccacaaagagtctacatgtctagggtctagacatgttcagctttgtggacctccggctcctgctcctcttagcggccaccgccctcctgacgcacggccaagaggaaggccaagtcgagggccaagacgaagacatcccaccaatcacctgcgtacagaacggcctcaggtaccatgaccgagacgtgtggaaacccgagccctgccggatctgcgtctgcgacaacggcaaggtgttgtgcgatgacgtgatctgtgacgagaccaagaactgccccggcgccgaagtccccgagggcgagtgctgtcccgtctgccccgacggctcagagtcacccaccgaccaagaaaccaccggcgtcgagggacccaagggagacactggcccccgaggcccaaggggacccgcaggcccccctggccgagatggcatccctggacagcctggacttcccggaccccccggaccccccggacctcccggaccccctggcctcggaggaaactttgctccccagctgtcttatggctatgatgagaaatcaaccggaggaatttccgtgcctggccccatgggtccctctggtcctcgtggtctccctggcccccctggtgcacctggtccccaaggcttccaaggtccccctggtgagcctggcgagcctggagcttcaggtcccatgggtccccgaggtcccccaggtccccctggaaagaatggagatgatggggaagctggaaaacctggtcgtcctggtgagcgtgggcctcctgggcctcagggtgctcgaggattgcccggaacagctggcctccctggaatgaagggacacagaggtttcagtggtttggatggtgccaagggagatgctggtcctgctggtcctaagggtgagcctggcagccctggtgaaaatggagctcctggtcagatgggcccccgtggcctgcctggtgagagaggtcgccctggagcccctggccctgctggtgctcgtggaaatgatggtgctactggtgctgccgggccccctggtcccaccggccccgctggtcctcctggcttccctggtgctgttggtgctaagggtgaagctggtccccaagggccccgaggctctgaaggtccccagggtgtgcgtggtgagcctggcccccctggccctgctggtgctgctggccctgctggaaaccctggtgctgatggacagcctggtgctaaaggtgccaatggtgctcctggtattgctggtgctcctggcttccctggtgcccgaggcccctctggaccccagggccccggcggccctcctggtcccaagggtaacagcggtgaacctggtgctcctggcagcaaaggagacactggtgctaagggagagcctggccctgttggtgttcaaggaccccctggccctgctggagaggaaggaaagcgaggagctcgaggtgaacccggacccactggcctgcccggaccccctggcgagcgtggtggacctggtagccgtggtttccctggcgcagatggtgttgctggtcccaagggtcccgctggtgaacgtggttctcctggccctgctggccccaaaggatctcctggtgaagctggtcgtcccggtgaagctggtctgcctggtgccaagggtctgactggaagccctggcagccctggtcctgatggcaaaactggcccccctggtcccgccggtcaagatggtcgccccggacccccaggcccacctggtgcccgtggtcaggctggtgtgatgggattccctggacctaaaggtgctgctggagagcccggcaaggctggagagcgaggtgttcccggaccccctggcgctgtcggtcctgctggcaaagatggagaggctggagctcagggaccccctggccctgctggtcccgctggcgagagaggtgaacaaggccctgctggctcccccggattccagggtctccctggtcctgctggtcctccaggtgaagcaggcaaacctggtgaacagggtgttcctggagaccttggcgcccctggcccctctggagcaagaggcgagagaggtttccctggcgagcgtggtgtgcaaggtccccctggtcctgctggtccccgaggggccaacggtgctcccggcaacgatggtgctaagggtgatgctggtgcccctggagctcccggtagccagggcgcccctggccttcagggaatgcctggtgaacgtggtgcagctggtcttccagggcctaagggtgacagaggtgatgctggtcccaaaggtgctgatggctctcctggcaaagatggcgtccgtggtctgactggccccattggtcctcctggccctgctggtgcccctggtgacaagggtgaaagtggtcccagcggccctgctggtcccactggagctcgtggtgcccccggagaccgtggtgagcctggtccccccggccctgctggctttgctggcccccctggtgctgacggccaacctggtgctaaaggcgaacctggtgatgctggtgctaaaggcgatgctggtccccctggccctgccggacccgctggaccccctggccccattggtaatgttggtgctcctggagccaaaggtgctcgcggcagcgctggtccccctggtgctactggtttccctggtgctgctggccgagtcggtcctcctggcccctctggaaatgctggaccccctggccctcctggtcctgctggcaaagaaggcggcaaaggtccccgtggtgagactggccctgctggacgtcctggtgaagttggtccccctggtccccctggccctgctggcgagaaaggatcccctggtgctgatggtcctgctggtgctcctggtactcccgggcctcaaggtattgctggacagcgtggtgtggtcggcctgcctggtcagagaggagagagaggcttccctggtcttcctggcccctctggtgaacctggcaaacaaggtccctctggagcaagtggtgaacgtggtccccctggtcccatgggcccccctggattggctggaccccctggtgaatctggacgtgagggggctcctggtgccgaaggttcccctggacgagacggttctcctggcgccaagggtgaccgtggtgagaccggccccgctggaccccctggtgctcctggtgctcctggtgcccctggccccgttggccctgctggcaagagtggtgatcgtggtgagactggtcctgctggtcccaccggtcctgtcggccctgttggcgcccgtggccccgccggaccccaaggcccccgtggtgacaagggtgagacaggcgaacagggcgacagaggcataaagggtcaccgtggcttctctggcctccagggtccccctggccctcctggctctcctggtgaacaaggtccctctggagcctctggtcctgctggtccccgaggtccccctggctctgctggtgctcctggcaaagatggactcaacggtctccctggccccattgggccccctggtcctcgcggtcgcactggtgatgctggtcctgttggtccccccggccctcctggacctcctggtccccctggtcctcccagcgctggtttcgacttcagcttcctgccccagccacctcaagagaaggctcacgatggtggccgctactaccgggctgatgatgccaatgtggttcgtgaccgtgacctcgaggtggacaccaccctcaagagcctgagccagcagatcgagaacatccggagcccagagggcagccgcaagaaccccgcccgcacctgccgtgacctcaagatgtgccactctgactggaagagtggagagtactggattgaccccaaccaaggctgcaacctggatgccatcaaagtcttctgcaacatggagactggtgagacctgcgtgtaccccactcagcccagtgtggcccagaagaactggtacatcagcaagaaccccaaggacaagaggcatgtctggttcggcgagagcatgaccgatggattccagttcgagtatggcggccagggctccgaccctgccgatgtggccatccagctgaccttcctgcgcctgatgtccaccgaggcctcccagaacatcacctaccactgcaagaacagcgtggcctacatggaccagcagactggcaacctcaagaaggccctgctcctccagggctccaacgagatcgagatccgcgccgagggcaacagccgcttcacctacagcgtcactgtcgatggctgcacgagtcacaccggagcctggggcaagacagtgattgaatacaaaaccaccaagacctcccgcctgcccatcatcgatgtggcccccttggacgttggtgccccagaccaggaattcggcttcgacgttggccctgtctgcttcctgtaaactccctccatcccaacctggctccctcccacccaaccaactttccccccaacccggaaacagacaagcaacccaaactgaaccccctcaaaagccaaaaaatgggagacaatttcacatggactttggaaaatatttttttcctttgcattcatctctcaaacttagtttttatctttgaccaaccgaacatgaccaaaaaccaaaagtgcattcaaccttaccaaaaaaaaaaaaaaaaaaagaataaataaataactttttaaaaaaggaagcttggtccacttgcttgaagacccatgcgggggtaagtccctttctgcccgttgggcttatgaaaccccaatgctgccctttctgctcctttctccacaccccccttggggcctcccctccactccttcccaaatctgtctccccagaagacacaggaaacaatgtattgtctgcccagcaatcaaaggcaatgctcaaacacccaagtggcccccaccctcagcccgctcctgcccgcccagcacccccaggccctgggggacctggggttctcagactgccaaagaagccttgccatctggcgctcccatggctcttgcaacatctccccttcgtttttgagggggtcatgccgggggagccaccagcccctcactgggttcggaggagagtcaggaagggccacgacaaagcagaaacatcggatttggggaacgcgtgtcaatcccttgtgccgcagggctgggcgggagagactgttctgttccttgtgtaactgtgttgctgaaagactacctcgttcttgtcttgatgtgtcaccggggcaactgcctgggggcggggatgggggcagggtggaagcggctccccattttataccaaaggtgctacatctatgtgatgggtggggtggggagggaatcactggtgctatagaaattgagatgcccccccaggccagcaaatgttcctttttgttcaaagtctatttttattccttgatatttttctttttttttttttttttttgtggatggggacttgtgaatttttctaaaggtgctatttaacatgggaggagagcgtgtgcggctccagcccagcccgctgctcactttccaccctctctccacctgcctctggcttctcaggcctctgctctccgacctctctcctctgaaaccctcctccacagctgcagcccatcctcccggctccctcctagtctgtcctgcgtcctctgtccccgggtttcagagacaacttcccaaagcacaaagcagtttttccccctaggggtgggaggaagcaaaagactctgtacctattttgtatgtgtataataatttgagatgtttttaattattttgattgctggaataaagcatgtggaaatgacccaaacataatcgtcggagcagacgggagtttctcctcggggtcggagcaggaggcacgcggagtgtgaggccacgcatgagcggacgctaaccccctccccagccacaaagagtctacatgtctagggtctagacatgttcagctttgtggacctccggctcctgctcctcttagcggccaccgccctcctgacgcacggccaagaggaaggccaagtcgagggccaagacgaagacatcccaccaatcacctgcgtacagaacggcctcaggtaccatgaccgagacgtgtggaaacccgagccctgccggatctgcgtctgcgacaacggcaaggtgttgtgcgatgacgtgatctgtgacgagaccaagaactgccccggcgccgaagtccccgagggcgagtgctgtcccgtctgccccgacggctcagagtcacccaccgaccaagaaaccaccggcgtcgagggacccaagggagacactggcccccgaggcccaaggggacccgcaggcccccctggccgagatggcatccctggacagcctggacttcccggaccccccggaccccccggacctcccggaccccctggcctcggaggaaactttgctccccagctgtcttatggctatgatgagaaatcaaccggaggaatttccgtgcctggccccatgggtccctctggtcctcgtggtctccctggcccccctggtgcacctggtccccaaggcttccaaggtccccctggtgagcctggcgagcctggagcttcaggtcccatgggtccccgaggtcccccaggtccccctggaaagaatggagatgatggggaagctggaaaacctggtcgtcctggtgagcgtgggcctcctgggcctcagggtgctcgaggattgcccggaacagctggcctccctggaatgaagggacacagaggtttcagtggtttggatggtgccaagggagatgctggtcctgctggtcctaagggtgagcctggcagccctggtgaaaatggagctcctggtcagatgggcccccgtggcctgcctggtgagagaggtcgccctggagcccctggccctgctggtgctcgtggaaatgatggtgctactggtgctgccgggccccctggtcccaccggccccgctggtcctcctggcttccctggtgctgttggtgctaagggtgaagctggtccccaagggccccgaggctctgaaggtccccagggtgtgcgtggtgagcctggcccccctggccctgctggtgctgctggccctgctggaaaccctggtgctgatggacagcctggtgctaaaggtgccaatggtgctcctggtattgctggtgctcctggcttccctggtgcccgaggcccctctggaccccagggccccggcggccctcctggtcccaagggtaacagcggtgaacctggtgctcctggcagcaaaggagacactggtgctaagggagagcctggccctgttggtgttcaaggaccccctggccctgctggagaggaaggaaagcgaggagctcgaggtgaacccggacccactggcctgcccggaccccctggcgagcgtggtggacctggtagccgtggtttccctggcgcagatggtgttgctggtcccaagggtcccgctggtgaacgtggttctcctggccctgctggccccaaaggatctcctggtgaagctggtcgtcccggtgaagctggtctgcctggtgccaagggtctgactggaagccctggcagccctggtcctgatggcaaaactggcccccctggtcccgccggtcaagatggtcgccccggacccccaggcccacctggtgcccgtggtcaggctggtgtgatgggattccctggacctaaaggtgctgctggagagcccggcaaggctggagagcgaggtgttcccggaccccctggcgctgtcggtcctgctggcaaagatggagaggctggagctcagggaccccctggccctgctggtcccgctggcgagagaggtgaacaaggccctgctggctcccccggattccagggtctccctggtcctgctggtcctccaggtgaagcaggcaaacctggtgaacagggtgttcctggagaccttggcgcccctggcccctctggagcaagaggcgagagaggtttccctggcgagcgtggtgtgcaaggtccccctggtcctgctggtccccgaggggccaacggtgctcccggcaacgatggtgctaagggtgatgctggtgcccctggagctcccggtagccagggcgcccctggccttcagggaatgcctggtgaacgtggtgcagctggtcttccagggcctaagggtgacagaggtgatgctggtcccaaaggtgctgatggctctcctggcaaagatggcgtccgtggtctgactggccccattggtcctcctggccctgctggtgcccctggtgacaagggtgaaagtggtcccagcggccctgctggtcccactggagctcgtggtgcccccggagaccgtggtgagcctggtccccccggccctgctggctttgctggcccccctggtgctgacggccaacctggtgctaaaggcgaacctggtgatgctggtgctaaaggcgatgctggtccccctggccctgccggacccgctggaccccctggccccattggtaatgttggtgctcctggagccaaaggtgctcgcggcagcgctggtccccctggtgctactggtttccctggtgctgctggccgagtcggtcctcctggcccctctggaaatgctggaccccctggccctcctggtcctgctggcaaagaaggcggcaaaggtccccgtggtgagactggccctgctggacgtcctggtgaagttggtccccctggtccccctggccctgctggcgagaaaggatcccctggtgctgatggtcctgctggtgctcctggtactcccgggcctcaaggtattgctggacagcgtggtgtggtcggcctgcctggtcagagaggagagagaggcttccctggtcttcctggcccctctggtgaacctggcaaacaaggtccctctggagcaagtggtgaacgtggtccccctggtcccatgggcccccctggattggctggaccccctggtgaatctggacgtgagggggctcctggtgccgaaggttcccctggacgagacggttctcctggcgccaagggtgaccgtggtgagaccggccccgctggaccccctggtgctcctggtgctcctggtgcccctggccccgttggccctgctggcaagagtggtgatcgtggtgagactggtcctgctggtcccaccggtcctgtcggccctgttggcgcccgtggccccgccggaccccaaggcccccgtggtgacaagggtgagacaggcgaacagggcgacagaggcataaagggtcaccgtggcttctctggcctccagggtccccctggccctcctggctctcctggtgaacaaggtccctctggagcctctggtcctgctggtccccgaggtccccctggctctgctggtgctcctggcaaagatggactcaacggtctccctggccccattgggccccctggtcctcgcggtcgcactggtgatgctggtcctgttggtccccccggccctcctggacctcctggtccccctggtcctcccagcgctggtttcgacttcagcttcctgccccagccacctcaagagaaggctcacgatggtggccgctactaccgggctgatgatgccaatgtggttcgtgaccgtgacctcgaggtggacaccaccctcaagagcctgagccagcagatcgagaacatccggagcccagagggcagccgcaagaaccccgcccgcacctgccgtgacctcaagatgtgccactctgactggaagagtggagagtactggattgaccccaaccaaggctgcaacctggatgccatcaaagtcttctgcaacatggagactggtgagacctgcgtgtaccccactcagcccagtgtggcccagaagaactggtacatcagcaagaaccccaaggacaagaggcatgtctggttcggcgagagcatgaccgatggattccagttcgagtatggcggccagggctccgaccctgccgatgtggccatccagctgaccttcctgcgcctgatgtccaccgaggcctcccagaacatcacctaccactgcaagaacagcgtggcctacatggaccagcagactggcaacctcaagaaggccctgctcctccagggctccaacgagatcgagatccgcgccgagggcaacagccgcttcacctacagcgtcactgtcgatggctgcacgagtcacaccggagcctggggcaagacagtgattgaatacaaaaccaccaagacctcccgcctgcccatcatcgatgtggcccccttggacgttggtgccccagaccaggaattcggcttcgacgttggccctgtctgcttcctgtaaactccctccatcccaacctggctccctcccacccaaccaactttccccccaacccggaaacagacaagcaacccaaactgaaccccctcaaaagccaaaaaatgggagacaatttcacatggactttggaaaatatttttttcctttgcattcatctctcaaacttagtttttatctttgaccaaccgaacatgaccaaaaaccaaaagtgcattcaaccttaccaaaaaaaaaaaaaaaaaaagaataaataaataactttttaaaaaaggaagcttggtccacttgcttgaagacccatgcgggggtaagtccctttctgcccgttgggcttatgaaaccccaatgctgccctttctgctcctttctccacaccccccttggggcctcccctccactccttcccaaatctgtctccccagaagacacaggaaacaatgtattgtctgcccagcaatcaaaggcaatgctcaaacacccaagtggcccccaccctcagcccgctcctgcccgcccagcacccccaggccctgggggacctggggttctcagactgccaaagaagccttgccatctggcgctcccatggctcttgcaacatctccccttcgtttttgagggggtcatgccgggggagccaccagcccctcactgggttcggaggagagtcaggaagggccacgacaaagcagaaacatcggatttggggaacgcgtgtcaatcccttgtgccgcagggctgggcgggagagactgttctgttccttgtgtaactgtgttgctgaaagactacctcgttcttgtcttgatgtgtcaccggggcaactgcctgggggcggggatgggggcagggtggaagcggctccccattttataccaaaggtgctacatctatgtgatgggtggggtggggagggaatcactggtgctatagaaattgagatgcccccccaggccagcaaatgttcctttttgttcaaagtctatttttattccttgatatttttctttttttttttttttttttgtggatggggacttgtgaatttttctaaaggtgctatttaacatgggaggagagcgtgtgcggctccagcccagcccgctgctcactttccaccctctctccacctgcctctggcttctcaggcctctgctctccgacctctctcctctgaaaccctcctccacagctgcagcccatcctcccggctccctcctagtctgtcctgcgtcctctgtccccgggtttcagagacaacttcccaaagcacaaagcagtttttccccctaggggtgggaggaagcaaaagactctgtacctattttgtatgtgtataataatttgagatgtttttaattattttgattgctggaataaagcatgtggaaatgacccaaacataatcgtcggagcagacgggagtttctcctcggggtcggagcaggaggcacgcggagtgtgaggccacgcatgagcggacgctaaccccctccccagccacaaagagtctacatgtctagggtctagacatgttcagctttgtggacctccggctcctgctcctcttagcggccaccgccctcctgacgcacggccaagaggaaggccaagtcgagggccaagacgaagacatcccaccaatcacctgcgtacagaacggcctcaggtaccatgaccgagacgtgtggaaacccgagccctgccggatctgcgtctgcgacaacggcaaggtgttgtgcgatgacgtgatctgtgacgagaccaagaactgccccggcgccgaagtccccgagggcgagtgctgtcccgtctgccccgacggctcagagtcacccaccgaccaagaaaccaccggcgtcgagggacccaagggagacactggcccccgaggcccaaggggacccgcaggcccccctggccgagatggcatccctggacagcctggacttcccggaccccccggaccccccggacctcccggaccccctggcctcggaggaaactttgctccccagctgtcttatggctatgatgagaaatcaaccggaggaatttccgtgcctggccccatgggtccctctggtcctcgtggtctccctggcccccctggtgcacctggtccccaaggcttccaaggtccccctggtgagcctggcgagcctggagcttcaggtcccatgggtccccgaggtcccccaggtccccctggaaagaatggagatgatggggaagctggaaaacctggtcgtcctggtgagcgtgggcctcctgggcctcagggtgctcgaggattgcccggaacagctggcctccctggaatgaagggacacagaggtttcagtggtttggatggtgccaagggagatgctggtcctgctggtcctaagggtgagcctggcagccctggtgaaaatggagctcctggtcagatgggcccccgtggcctgcctggtgagagaggtcgccctggagcccctggccctgctggtgctcgtggaaatgatggtgctactggtgctgccgggccccctggtcccaccggccccgctggtcctcctggcttccctggtgctgttggtgctaagggtgaagctggtccccaagggccccgaggctctgaaggtccccagggtgtgcgtggtgagcctggcccccctggccctgctggtgctgctggccctgctggaaaccctggtgctgatggacagcctggtgctaaaggtgccaatggtgctcctggtattgctggtgctcctggcttccctggtgcccgaggcccctctggaccccagggccccggcggccctcctggtcccaagggtaacagcggtgaacctggtgctcctggcagcaaaggagacactggtgctaagggagagcctggccctgttggtgttcaaggaccccctggccctgctggagaggaaggaaagcgaggagctcgaggtgaacccggacccactggcctgcccggaccccctggcgagcgtggtggacctggtagccgtggtttccctggcgcagatggtgttgctggtcccaagggtcccgctggtgaacgtggttctcctggccctgctggccccaaaggatctcctggtgaagctggtcgtcccggtgaagctggtctgcctggtgccaagggtctgactggaagccctggcagccctggtcctgatggcaaaactggcccccctggtcccgccggtcaagatggtcgccccggacccccaggcccacctggtgcccgtggtcaggctggtgtgatgggattccctggacctaaaggtgctgctggagagcccggcaaggctggagagcgaggtgttcccggaccccctggcgctgtcggtcctgctggcaaagatggagaggctggagctcagggaccccctggccctgctggtcccgctggcgagagaggtgaacaaggccctgctggctcccccggattccagggtctccctggtcctgctggtcctccaggtgaagcaggcaaacctggtgaacagggtgttcctggagaccttggcgcccctggcccctctggagcaagaggcgagagaggtttccctggcgagcgtggtgtgcaaggtccccctggtcctgctggtccccgaggggccaacggtgctcccggcaacgatggtgctaagggtgatgctggtgcccctggagctcccggtagccagggcgcccctggccttcagggaatgcctggtgaacgtggtgcagctggtcttccagggcctaagggtgacagaggtgatgctggtcccaaaggtgctgatggctctcctggcaaagatggcgtccgtggtctgactggccccattggtcctcctggccctgctggtgcccctggtgacaagggtgaaagtggtcccagcggccctgctggtcccactggagctcgtggtgcccccggagaccgtggtgagcctggtccccccggccctgctggctttgctggcccccctggtgctgacggccaacctggtgctaaaggcgaacctggtgatgctggtgctaaaggcgatgctggtccccctggccctgccggacccgctggaccccctggccccattggtaatgttggtgctcctggagccaaaggtgctcgcggcagcgctggtccccctggtgctactggtttccctggtgctgctggccgagtcggtcctcctggcccctctggaaatgctggaccccctggccctcctggtcctgctggcaaagaaggcggcaaaggtccccgtggtgagactggccctgctggacgtcctggtgaagttggtccccctggtccccctggccctgctggcgagaaaggatcccctggtgctgatggtcctgctggtgctcctggtactcccgggcctcaaggtattgctggacagcgtggtgtggtcggcctgcctggtcagagaggagagagaggcttccctggtcttcctggcccctctggtgaacctggcaaacaaggtccctctggagcaagtggtgaacgtggtccccctggtcccatgggcccccctggattggctggaccccctggtgaatctggacgtgagggggctcctggtgccgaaggttcccctggacgagacggttctcctggcgccaagggtgaccgtggtgagaccggccccgctggaccccctggtgctcctggtgctcctggtgcccctggccccgttggccctgctggcaagagtggtgatcgtggtgagactggtcctgctggtcccaccggtcctgtcggccctgttggcgcccgtggccccgccggaccccaaggcccccgtggtgacaagggtgagacaggcgaacagggcgacagaggcataaagggtcaccgtggcttctctggcctccagggtccccctggccctcctggctctcctggtgaacaaggtccctctggagcctctggtcctgctggtccccgaggtccccctggctctgctggtgctcctggcaaagatggactcaacggtctccctggccccattgggccccctggtcctcgcggtcgcactggtgatgctggtcctgttggtccccccggccctcctggacctcctggtccccctggtcctcccagcgctggtttcgacttcagcttcctgccccagccacctcaagagaaggctcacgatggtggccgctactaccgggctgatgatgccaatgtggttcgtgaccgtgacctcgaggtggacaccaccctcaagagcctgagccagcagatcgagaacatccggagcccagagggcagccgcaagaaccccgcccgcacctgccgtgacctcaagatgtgccactctgactggaagagtggagagtactggattgaccccaaccaaggctgcaacctggatgccatcaaagtcttctgcaacatggagactggtgagacctgcgtgtaccccactcagcccagtgtggcccagaagaactggtacatcagcaagaaccccaaggacaagaggcatgtctggttcggcgagagcatgaccgatggattccagttcgagtatggcggccagggctccgaccctgccgatgtggccatccagctgaccttcctgcgcctgatgtccaccgaggcctcccagaacatcacctaccactgcaagaacagcgtggcctacatggaccagcagactggcaacctcaagaaggccctgctcctccagggctccaacgagatcgagatccgcgccgagggcaacagccgcttcacctacagcgtcactgtcgatggctgcacgagtcacaccggagcctggggcaagacagtgattgaatacaaaaccaccaagacctcccgcctgcccatcatcgatgtggcccccttggacgttggtgccccagaccaggaattcggcttcgacgttggccctgtctgcttcctgtaaactccctccatcccaacctggctccctcccacccaaccaactttccccccaacccggaaacagacaagcaacccaaactgaaccccctcaaaagccaaaaaatgggagacaatttcacatggactttggaaaatatttttttcctttgcattcatctctcaaacttagtttttatctttgaccaaccgaacatgaccaaaaaccaaaagtgcattcaaccttaccaaaaaaaaaaaaaaaaaaagaataaataaataactttttaaaaaaggaagcttggtccacttgcttgaagacccatgcgggggtaagtccctttctgcccgttgggcttatgaaaccccaatgctgccctttctgctcctttctccacaccccccttggggcctcccctccactccttcccaaatctgtctccccagaagacacaggaaacaatgtattgtctgcccagcaatcaaaggcaatgctcaaacacccaagtggcccccaccctcagcccgctcctgcccgcccagcacccccaggccctgggggacctggggttctcagactgccaaagaagccttgccatctggcgctcccatggctcttgcaacatctccccttcgtttttgagggggtcatgccgggggagccaccagcccctcactgggttcggaggagagtcaggaagggccacgacaaagcagaaacatcggatttggggaacgcgtgtcaatcccttgtgccgcagggctgggcgggagagactgttctgttccttgtgtaactgtgttgctgaaagactacctcgttcttgtcttgatgtgtcaccggggcaactgcctgggggcggggatgggggcagggtggaagcggctccccattttataccaaaggtgctacatctatgtgatgggtggggtggggagggaatcactggtgctatagaaattgagatgcccccccaggccagcaaatgttcctttttgttcaaagtctatttttattccttgatatttttctttttttttttttttttttgtggatggggacttgtgaatttttctaaaggtgctatttaacatgggaggagagcgtgtgcggctccagcccagcccgctgctcactttccaccctctctccacctgcctctggcttctcaggcctctgctctccgacctctctcctctgaaaccctcctccacagctgcagcccatcctcccggctccctcctagtctgtcctgcgtcctctgtccccgggtttcagagacaacttcccaaagcacaaagcagtttttccccctaggggtgggaggaagcaaaagactctgtacctattttgtatgtgtataataatttgagatgtttttaattattttgattgctggaataaagcatgtggaaatgacccaaacataatcgtcggagcagacgggagtttctcctcggggtcggagcaggaggcacgcggagtgtgaggccacgcatgagcggacgctaaccccctccccagccacaaagagtctacatgtctagggtctagacatgttcagctttgtggacctccggctcctgctcctcttagcggccaccgccctcctgacgcacggccaagaggaaggccaagtcgagggccaagacgaagacatcccaccaatcacctgcgtacagaacggcctcaggtaccatgaccgagacgtgtggaaacccgagccctgccggatctgcgtctgcgacaacggcaaggtgttgtgcgatgacgtgatctgtgacgagaccaagaactgccccggcgccgaagtccccgagggcgagtgctgtcccgtctgccccgacggctcagagtcacccaccgaccaagaaaccaccggcgtcgagggacccaagggagacactggcccccgaggcccaaggggacccgcaggcccccctggccgagatggcatccctggacagcctggacttcccggaccccccggaccccccggacctcccggaccccctggcctcggaggaaactttgctccccagctgtcttatggctatgatgagaaatcaaccggaggaatttccgtgcctggccccatgggtccctctggtcctcgtggtctccctggcccccctggtgcacctggtccccaaggcttccaaggtccccctggtgagcctggcgagcctggagcttcaggtcccatgggtccccgaggtcccccaggtccccctggaaagaatggagatgatggggaagctggaaaacctggtcgtcctggtgagcgtgggcctcctgggcctcagggtgctcgaggattgcccggaacagctggcctccctggaatgaagggacacagaggtttcagtggtttggatggtgccaagggagatgctggtcctgctggtcctaagggtgagcctggcagccctggtgaaaatggagctcctggtcagatgggcccccgtggcctgcctggtgagagaggtcgccctggagcccctggccctgctggtgctcgtggaaatgatggtgctactggtgctgccgggccccctggtcccaccggccccgctggtcctcctggcttccctggtgctgttggtgctaagggtgaagctggtccccaagggccccgaggctctgaaggtccccagggtgtgcgtggtgagcctggcccccctggccctgctggtgctgctggccctgctggaaaccctggtgctgatggacagcctggtgctaaaggtgccaatggtgctcctggtattgctggtgctcctggcttccctggtgcccgaggcccctctggaccccagggccccggcggccctcctggtcccaagggtaacagcggtgaacctggtgctcctggcagcaaaggagacactggtgctaagggagagcctggccctgttggtgttcaaggaccccctggccctgctggagaggaag

SEQ ID NO: 824 - DNA, 32765 bp, Homo sapiens
  misc_feature (991)..(991): second gene strats at position 991
atggatgattttgagcgtcgcagagaacttagaaggcaaaagagggaggagatgcgactcgaagcagaaagaatcgcctaccagaggaatgacgatgatgaagaggaggcagcccgggaacggcgccgccgagcccgacaggaacggctgcggcagaagcaggaggaagaatccttgggacaggtgaccgaccaggtggaggtgaatgcccagaacagtgtgcctgacgaggaggccaagacaaccaccacaaacactcaagtggaaggggatgatgaggccgcattcctggagcgcctggctcggcgtgaggaaagacgccaaaaacgccttcaggaggctctggagcggcagaaggagttcgacccaacaataacagatgcaagtctgtcgctcccaagcagaagaatgcaaaatgacacagcagaaaatgaaactaccgagaaggaagaaaaaagtgaaagtcgccaagaaagatacgagatagaggaaacagaaacagtcaccaagtcctaccagaagaatgattggagggatgctgaagaaaacaagaaagaagacaaggaaaaggaggaggaggaagaggagaagccaaagcgagggagcattggagaaaatcagatcaaagatgaaaagattaaaaaggacaaagaacccaaagaagaagttaagagcttcatggatcgaaagaagggatttacagaagttaagtcgcagaatggagaattcatgacccacaaacttaaacatactgagaatactttcagccgccctggagggagggccagcgtggacaccaaggaggctgagggcgccccccaggtggaagccggcaaaaggctggaggagcttcgtcgtcgtcgcggggagaccgagagcgaagagttcgagaagctcaaacagaagcagcaggaggcggctttggagctggaggaactcaagaaaaagagggaggagagaaggaaggtcctggaggaggaagagcagaggctcctgctcctcttagcggccaccgccctcctgacgcacggccaagaggaaggccaagtcgagggccaagacgaagacatcccaccaatcacctgcgtacagaacggcctcaggtaccatgaccgagacgtgtggaaacccgagccctgccggatctgcgtctgcgacaacggcaaggtgttgtgcgatgacgtgatctgtgacgagaccaagaactgccccggcgccgaagtccccgagggcgagtgctgtcccgtctgccccgacggctcagagtcacccaccgaccaagaaaccaccggcgtcgagggacccaagggagacactggcccccgaggcccaaggggacccgcaggcccccctggccgagatggcatccctggacagcctggacttcccggaccccccggaccccccggacctcccggaccccctggcctcggaggaaactttgctccccagctgtcttatggctatgatgagaaatcaaccggaggaatttccgtgcctggccccatgggtccctctggtcctcgtggtctccctggcccccctggtgcacctggtccccaaggcttccaaggtccccctggtgagcctggcgagcctggagcttcaggtcccatgggtccccgaggtcccccaggtccccctggaaagaatggagatgatggggaagctggaaaacctggtcgtcctggtgagcgtgggcctcctgggcctcagggtgctcgaggattgcccggaacagctggcctccctggaatgaagggacacagaggtttcagtggtttggatggtgccaagggagatgctggtcctgctggtcctaagggtgagcctggcagccctggtgaaaatggagctcctggtcagatgggcccccgtggcctgcctggtgagagaggtcgccctggagcccctggccctgctggtgctcgtggaaatgatggtgctactggtgctgccgggccccctggtcccaccggccccgctggtcctcctggcttccctggtgctgttggtgctaagggtgaagctggtccccaagggccccgaggctctgaaggtccccagggtgtgcgtggtgagcctggcccccctggccctgctggtgctgctggccctgctggaaaccctggtgctgatggacagcctggtgctaaaggtgccaatggtgctcctggtattgctggtgctcctggcttccctggtgcccgaggcccctctggaccccagggccccggcggccctcctggtcccaagggtaacagcggtgaacctggtgctcctggcagcaaaggagacactggtgctaagggagagcctggccctgttggtgttcaaggaccccctggccctgctggagaggaaggaaagcgaggagctcgaggtgaacccggacccactggcctgcccggaccccctggcgagcgtggtggacctggtagccgtggtttccctggcgcagatggtgttgctggtcccaagggtcccgctggtgaacgtggttctcctggccctgctggccccaaaggatctcctggtgaagctggtcgtcccggtgaagctggtctgcctggtgccaagggtctgactggaagccctggcagccctggtcctgatggcaaaactggcccccctggtcccgccggtcaagatggtcgccccggacccccaggcccacctggtgcccgtggtcaggctggtgtgatgggattccctggacctaaaggtgctgctggagagcccggcaaggctggagagcgaggtgttcccggaccccctggcgctgtcggtcctgctggcaaagatggagaggctggagctcagggaccccctggccctgctggtcccgctggcgagagaggtgaacaaggccctgctggctcccccggattccagggtctccctggtcctgctggtcctccaggtgaagcaggcaaacctggtgaacagggtgttcctggagaccttggcgcccctggcccctctggagcaagaggcgagagaggtttccctggcgagcgtggtgtgcaaggtccccctggtcctgctggtccccgaggggccaacggtgctcccggcaacgatggtgctaagggtgatgctggtgcccctggagctcccggtagccagggcgcccctggccttcagggaatgcctggtgaacgtggtgcagctggtcttccagggcctaagggtgacagaggtgatgctggtcccaaaggtgctgatggctctcctggcaaagatggcgtccgtggtctgactggccccattggtcctcctggccctgctggtgcccctggtgacaagggtgaaagtggtcccagcggccctgctggtcccactggagctcgtggtgcccccggagaccgtggtgagcctggtccccccggccctgctggctttgctggcccccctggtgctgacggccaacctggtgctaaaggcgaacctggtgatgctggtgctaaaggcgatgctggtccccctggccctgccggacccgctggaccccctggccccattggtaatgttggtgctcctggagccaaaggtgctcgcggcagcgctggtccccctggtgctactggtttccctggtgctgctggccgagtcggtcctcctggcccctctggaaatgctggaccccctggccctcctggtcctgctggcaaagaaggcggcaaaggtccccgtggtgagactggccctgctggacgtcctggtgaagttggtccccctggtccccctggccctgctggcgagaaaggatcccctggtgctgatggtcctgctggtgctcctggtactcccgggcctcaaggtattgctggacagcgtggtgtggtcggcctgcctggtcagagaggagagagaggcttccctggtcttcctggcccctctggtgaacctggcaaacaaggtccctctggagcaagtggtgaacgtggtccccctggtcccatgggcccccctggattggctggaccccctggtgaatctggacgtgagggggctcctggtgccgaaggttcccctggacgagacggttctcctggcgccaagggtgaccgtggtgagaccggccccgctggaccccctggtgctcctggtgctcctggtgcccctggccccgttggccctgctggcaagagtggtgatcgtggtgagactggtcctgctggtcccaccggtcctgtcggccctgttggcgcccgtggccccgccggaccccaaggcccccgtggtgacaagggtgagacaggcgaacagggcgacagaggcataaagggtcaccgtggcttctctggcctccagggtccccctggccctcctggctctcctggtgaacaaggtccctctggagcctctggtcctgctggtccccgaggtccccctggctctgctggtgctcctggcaaagatggactcaacggtctccctggccccattgggccccctggtcctcgcggtcgcactggtgatgctggtcctgttggtccccccggccctcctggacctcctggtccccctggtcctcccagcgctggtttcgacttcagcttcctgccccagccacctcaagagaaggctcacgatggtggccgctactaccgggctgatgatgccaatgtggttcgtgaccgtgacctcgaggtggacaccaccctcaagagcctgagccagcagatcgagaacatccggagcccagagggcagccgcaagaaccccgcccgcacctgccgtgacctcaagatgtgccactctgactggaagagtggagagtactggattgaccccaaccaaggctgcaacctggatgccatcaaagtcttctgcaacatggagactggtgagacctgcgtgtaccccactcagcccagtgtggcccagaagaactggtacatcagcaagaaccccaaggacaagaggcatgtctggttcggcgagagcatgaccgatggattccagttcgagtatggcggccagggctccgaccctgccgatgtggccatccagctgaccttcctgcgcctgatgtccaccgaggcctcccagaacatcacctaccactgcaagaacagcgtggcctacatggaccagcagactggcaacctcaagaaggccctgctcctccagggctccaacgagatcgagatccgcgccgagggcaacagccgcttcacctacagcgtcactgtcgatggctgcacgagtcacaccggagcctggggcaagacagtgattgaatacaaaaccaccaagacctcccgcctgcccatcatcgatgtggcccccttggacgttggtgccccagaccaggaattcggcttcgacgttggccctgtctgcttcctgtaaactccctccatcccaacctggctccctcccacccaaccaactttccccccaacccggaaacagacaagcaacccaaactgaaccccctcaaaagccaaaaaatgggagacaatttcacatggactttggaaaatatttttttcctttgcattcatctctcaaacttagtttttatctttgaccaaccgaacatgaccaaaaaccaaaagtgcattcaaccttaccaaaaaaaaaaaaaaaaaaagaataaataaataactttttaaaaaaggaagcttggtccacttgcttgaagacccatgcgggggtaagtccctttctgcccgttgggcttatgaaaccccaatgctgccctttctgctcctttctccacaccccccttggggcctcccctccactccttcccaaatctgtctccccagaagacacaggaaacaatgtattgtctgcccagcaatcaaaggcaatgctcaaacacccaagtggcccccaccctcagcccgctcctgcccgcccagcacccccaggccctgggggacctggggttctcagactgccaaagaagccttgccatctggcgctcccatggctcttgcaacatctccccttcgtttttgagggggtcatgccgggggagccaccagcccctcactgggttcggaggagagtcaggaagggccacgacaaagcagaaacatcggatttggggaacgcgtgtcaatcccttgtgccgcagggctgggcgggagagactgttctgttccttgtgtaactgtgttgctgaaagactacctcgttcttgtcttgatgtgtcaccggggcaactgcctgggggcggggatgggggcagggtggaagcggctccccattttataccaaaggtgctacatctatgtgatgggtggggtggggagggaatcactggtgctatagaaattgagatgcccccccaggccagcaaatgttcctttttgttcaaagtctatttttattccttgatatttttctttttttttttttttttttgtggatggggacttgtgaatttttctaaaggtgctatttaacatgggaggagagcgtgtgcggctccagcccagcccgctgctcactttccaccctctctccacctgcctctggcttctcaggcctctgctctccgacctctctcctctgaaaccctcctccacagctgcagcccatcctcccggctccctcctagtctgtcctgcgtcctctgtccccgggtttcagagacaacttcccaaagcacaaagcagtttttccccctaggggtgggaggaagcaaaagactctgtacctattttgtatgtgtataataatttgagatgtttttaattattttgattgctggaataaagcatgtggaaatgacccaaacataatcgtcggagcagacgggagtttctcctcggggtcggagcaggaggcacgcggagtgtgaggccacgcatgagcggacgctaaccccctccccagccacaaagagtctacatgtctagggtctagacatgttcagctttgtggacctccggctcctgctcctcttagcggccaccgccctcctgacgcacggccaagaggaaggccaagtcgagggccaagacgaagacatcccaccaatcacctgcgtacagaacggcctcaggtaccatgaccgagacgtgtggaaacccgagccctgccggatctgcgtctgcgacaacggcaaggtgttgtgcgatgacgtgatctgtgacgagaccaagaactgccccggcgccgaagtccccgagggcgagtgctgtcccgtctgccccgacggctcagagtcacccaccgaccaagaaaccaccggcgtcgagggacccaagggagacactggcccccgaggcccaaggggacccgcaggcccccctggccgagatggcatccctggacagcctggacttcccggaccccccggaccccccggacctcccggaccccctggcctcggaggaaactttgctccccagctgtcttatggctatgatgagaaatcaaccggaggaatttccgtgcctggccccatgggtccctctggtcctcgtggtctccctggcccccctggtgcacctggtccccaaggcttccaaggtccccctggtgagcctggcgagcctggagcttcaggtcccatgggtccccgaggtcccccaggtccccctggaaagaatggagatgatggggaagctggaaaacctggtcgtcctggtgagcgtgggcctcctgggcctcagggtgctcgaggattgcccggaacagctggcctccctggaatgaagggacacagaggtttcagtggtttggatggtgccaagggagatgctggtcctgctggtcctaagggtgagcctggcagccctggtgaaaatggagctcctggtcagatgggcccccgtggcctgcctggtgagagaggtcgccctggagcccctggccctgctggtgctcgtggaaatgatggtgctactggtgctgccgggccccctggtcccaccggccccgctggtcctcctggcttccctggtgctgttggtgctaagggtgaagctggtccccaagggccccgaggctctgaaggtccccagggtgtgcgtggtgagcctggcccccctggccctgctggtgctgctggccctgctggaaaccctggtgctgatggacagcctggtgctaaaggtgccaatggtgctcctggtattgctggtgctcctggcttccctggtgcccgaggcccctctggaccccagggccccggcggccctcctggtcccaagggtaacagcggtgaacctggtgctcctggcagcaaaggagacactggtgctaagggagagcctggccctgttggtgttcaaggaccccctggccctgctggagaggaaggaaagcgaggagctcgaggtgaacccggacccactggcctgcccggaccccctggcgagcgtggtggacctggtagccgtggtttccctggcgcagatggtgttgctggtcccaagggtcccgctggtgaacgtggttctcctggccctgctggccccaaaggatctcctggtgaagctggtcgtcccggtgaagctggtctgcctggtgccaagggtctgactggaagccctggcagccctggtcctgatggcaaaactggcccccctggtcccgccggtcaagatggtcgccccggacccccaggcccacctggtgcccgtggtcaggctggtgtgatgggattccctggacctaaaggtgctgctggagagcccggcaaggctggagagcgaggtgttcccggaccccctggcgctgtcggtcctgctggcaaagatggagaggctggagctcagggaccccctggccctgctggtcccgctggcgagagaggtgaacaaggccctgctggctcccccggattccagggtctccctggtcctgctggtcctccaggtgaagcaggcaaacctggtgaacagggtgttcctggagaccttggcgcccctggcccctctggagcaagaggcgagagaggtttccctggcgagcgtggtgtgcaaggtccccctggtcctgctggtccccgaggggccaacggtgctcccggcaacgatggtgctaagggtgatgctggtgcccctggagctcccggtagccagggcgcccctggccttcagggaatgcctggtgaacgtggtgcagctggtcttccagggcctaagggtgacagaggtgatgctggtcccaaaggtgctgatggctctcctggcaaagatggcgtccgtggtctgactggccccattggtcctcctggccctgctggtgcccctggtgacaagggtgaaagtggtcccagcggccctgctggtcccactggagctcgtggtgcccccggagaccgtggtgagcctggtccccccggccctgctggctttgctggcccccctggtgctgacggccaacctggtgctaaaggcgaacctggtgatgctggtgctaaaggcgatgctggtccccctggccctgccggacccgctggaccccctggccccattggtaatgttggtgctcctggagccaaaggtgctcgcggcagcgctggtccccctggtgctactggtttccctggtgctgctggccgagtcggtcctcctggcccctctggaaatgctggaccccctggccctcctggtcctgctggcaaagaaggcggcaaaggtccccgtggtgagactggccctgctggacgtcctggtgaagttggtccccctggtccccctggccctgctggcgagaaaggatcccctggtgctgatggtcctgctggtgctcctggtactcccgggcctcaaggtattgctggacagcgtggtgtggtcggcctgcctggtcagagaggagagagaggcttccctggtcttcctggcccctctggtgaacctggcaaacaaggtccctctggagcaagtggtgaacgtggtccccctggtcccatgggcccccctggattggctggaccccctggtgaatctggacgtgagggggctcctggtgccgaaggttcccctggacgagacggttctcctggcgccaagggtgaccgtggtgagaccggccccgctggaccccctggtgctcctggtgctcctggtgcccctggccccgttggccctgctggcaagagtggtgatcgtggtgagactggtcctgctggtcccaccggtcctgtcggccctgttggcgcccgtggccccgccggaccccaaggcccccgtggtgacaagggtgagacaggcgaacagggcgacagaggcataaagggtcaccgtggcttctctggcctccagggtccccctggccctcctggctctcctggtgaacaaggtccctctggagcctctggtcctgctggtccccgaggtccccctggctctgctggtgctcctggcaaagatggactcaacggtctccctggccccattgggccccctggtcctcgcggtcgcactggtgatgctggtcctgttggtccccccggccctcctggacctcctggtccccctggtcctcccagcgctggtttcgacttcagcttcctgccccagccacctcaagagaaggctcacgatggtggccgctactaccgggctgatgatgccaatgtggttcgtgaccgtgacctcgaggtggacaccaccctcaagagcctgagccagcagatcgagaacatccggagcccagagggcagccgcaagaaccccgcccgcacctgccgtgacctcaagatgtgccactctgactggaagagtggagagtactggattgaccccaaccaaggctgcaacctggatgccatcaaagtcttctgcaacatggagactggtgagacctgcgtgtaccccactcagcccagtgtggcccagaagaactggtacatcagcaagaaccccaaggacaagaggcatgtctggttcggcgagagcatgaccgatggattccagttcgagtatggcggccagggctccgaccctgccgatgtggccatccagctgaccttcctgcgcctgatgtccaccgaggcctcccagaacatcacctaccactgcaagaacagcgtggcctacatggaccagcagactggcaacctcaagaaggccctgctcctccagggctccaacgagatcgagatccgcgccgagggcaacagccgcttcacctacagcgtcactgtcgatggctgcacgagtcacaccggagcctggggcaagacagtgattgaatacaaaaccaccaagacctcccgcctgcccatcatcgatgtggcccccttggacgttggtgccccagaccaggaattcggcttcgacgttggccctgtctgcttcctgtaaactccctccatcccaacctggctccctcccacccaaccaactttccccccaacccggaaacagacaagcaacccaaactgaaccccctcaaaagccaaaaaatgggagacaatttcacatggactttggaaaatatttttttcctttgcattcatctctcaaacttagtttttatctttgaccaaccgaacatgaccaaaaaccaaaagtgcattcaaccttaccaaaaaaaaaaaaaaaaaaagaataaataaataactttttaaaaaaggaagcttggtccacttgcttgaagacccatgcgggggtaagtccctttctgcccgttgggcttatgaaaccccaatgctgccctttctgctcctttctccacaccccccttggggcctcccctccactccttcccaaatctgtctccccagaagacacaggaaacaatgtattgtctgcccagcaatcaaaggcaatgctcaaacacccaagtggcccccaccctcagcccgctcctgcccgcccagcacccccaggccctgggggacctggggttctcagactgccaaagaagccttgccatctggcgctcccatggctcttgcaacatctccccttcgtttttgagggggtcatgccgggggagccaccagcccctcactgggttcggaggagagtcaggaagggccacgacaaagcagaaacatcggatttggggaacgcgtgtcaatcccttgtgccgcagggctgggcgggagagactgttctgttccttgtgtaactgtgttgctgaaagactacctcgttcttgtcttgatgtgtcaccggggcaactgcctgggggcggggatgggggcagggtggaagcggctccccattttataccaaaggtgctacatctatgtgatgggtggggtggggagggaatcactggtgctatagaaattgagatgcccccccaggccagcaaatgttcctttttgttcaaagtctatttttattccttgatatttttctttttttttttttttttttgtggatggggacttgtgaatttttctaaaggtgctatttaacatgggaggagagcgtgtgcggctccagcccagcccgctgctcactttccaccctctctccacctgcctctggcttctcaggcctctgctctccgacctctctcctctgaaaccctcctccacagctgcagcccatcctcccggctccctcctagtctgtcctgcgtcctctgtccccgggtttcagagacaacttcccaaagcacaaagcagtttttccccctaggggtgggaggaagcaaaagactctgtacctattttgtatgtgtataataatttgagatgtttttaattattttgattgctggaataaagcatgtggaaatgacccaaacataatcgtcggagcagacgggagtttctcctcggggtcggagcaggaggcacgcggagtgtgaggccacgcatgagcggacgctaaccccctccccagccacaaagagtctacatgtctagggtctagacatgttcagctttgtggacctccggctcctgctcctcttagcggccaccgccctcctgacgcacggccaagaggaaggccaagtcgagggccaagacgaagacatcccaccaatcacctgcgtacagaacggcctcaggtaccatgaccgagacgtgtggaaacccgagccctgccggatctgcgtctgcgacaacggcaaggtgttgtgcgatgacgtgatctgtgacgagaccaagaactgccccggcgccgaagtccccgagggcgagtgctgtcccgtctgccccgacggctcagagtcacccaccgaccaagaaaccaccggcgtcgagggacccaagggagacactggcccccgaggcccaaggggacccgcaggcccccctggccgagatggcatccctggacagcctggacttcccggaccccccggaccccccggacctcccggaccccctggcctcggaggaaactttgctccccagctgtcttatggctatgatgagaaatcaaccggaggaatttccgtgcctggccccatgggtccctctggtcctcgtggtctccctggcccccctggtgcacctggtccccaaggcttccaaggtccccctggtgagcctggcgagcctggagcttcaggtcccatgggtccccgaggtcccccaggtccccctggaaagaatggagatgatggggaagctggaaaacctggtcgtcctggtgagcgtgggcctcctgggcctcagggtgctcgaggattgcccggaacagctggcctccctggaatgaagggacacagaggtttcagtggtttggatggtgccaagggagatgctggtcctgctggtcctaagggtgagcctggcagccctggtgaaaatggagctcctggtcagatgggcccccgtggcctgcctggtgagagaggtcgccctggagcccctggccctgctggtgctcgtggaaatgatggtgctactggtgctgccgggccccctggtcccaccggccccgctggtcctcctggcttccctggtgctgttggtgctaagggtgaagctggtccccaagggccccgaggctctgaaggtccccagggtgtgcgtggtgagcctggcccccctggccctgctggtgctgctggccctgctggaaaccctggtgctgatggacagcctggtgctaaaggtgccaatggtgctcctggtattgctggtgctcctggcttccctggtgcccgaggcccctctggaccccagggccccggcggccctcctggtcccaagggtaacagcggtgaacctggtgctcctggcagcaaaggagacactggtgctaagggagagcctggccctgttggtgttcaaggaccccctggccctgctggagaggaaggaaagcgaggagctcgaggtgaacccggacccactggcctgcccggaccccctggcgagcgtggtggacctggtagccgtggtttccctggcgcagatggtgttgctggtcccaagggtcccgctggtgaacgtggttctcctggccctgctggccccaaaggatctcctggtgaagctggtcgtcccggtgaagctggtctgcctggtgccaagggtctgactggaagccctggcagccctggtcctgatggcaaaactggcccccctggtcccgccggtcaagatggtcgccccggacccccaggcccacctggtgcccgtggtcaggctggtgtgatgggattccctggacctaaaggtgctgctggagagcccggcaaggctggagagcgaggtgttcccggaccccctggcgctgtcggtcctgctggcaaagatggagaggctggagctcagggaccccctggccctgctggtcccgctggcgagagaggtgaacaaggccctgctggctcccccggattccagggtctccctggtcctgctggtcctccaggtgaagcaggcaaacctggtgaacagggtgttcctggagaccttggcgcccctggcccctctggagcaagaggcgagagaggtttccctggcgagcgtggtgtgcaaggtccccctggtcctgctggtccccgaggggccaacggtgctcccggcaacgatggtgctaagggtgatgctggtgcccctggagctcccggtagccagggcgcccctggccttcagggaatgcctggtgaacgtggtgcagctggtcttccagggcctaagggtgacagaggtgatgctggtcccaaaggtgctgatggctctcctggcaaagatggcgtccgtggtctgactggccccattggtcctcctggccctgctggtgcccctggtgacaagggtgaaagtggtcccagcggccctgctggtcccactggagctcgtggtgcccccggagaccgtggtgagcctggtccccccggccctgctggctttgctggcccccctggtgctgacggccaacctggtgctaaaggcgaacctggtgatgctggtgctaaaggcgatgctggtccccctggccctgccggacccgctggaccccctggccccattggtaatgttggtgctcctggagccaaaggtgctcgcggcagcgctggtccccctggtgctactggtttccctggtgctgctggccgagtcggtcctcctggcccctctggaaatgctggaccccctggccctcctggtcctgctggcaaagaaggcggcaaaggtccccgtggtgagactggccctgctggacgtcctggtgaagttggtccccctggtccccctggccctgctggcgagaaaggatcccctggtgctgatggtcctgctggtgctcctggtactcccgggcctcaaggtattgctggacagcgtggtgtggtcggcctgcctggtcagagaggagagagaggcttccctggtcttcctggcccctctggtgaacctggcaaacaaggtccctctggagcaagtggtgaacgtggtccccctggtcccatgggcccccctggattggctggaccccctggtgaatctggacgtgagggggctcctggtgccgaaggttcccctggacgagacggttctcctggcgccaagggtgaccgtggtgagaccggccccgctggaccccctggtgctcctggtgctcctggtgcccctggccccgttggccctgctggcaagagtggtgatcgtggtgagactggtcctgctggtcccaccggtcctgtcggccctgttggcgcccgtggccccgccggaccccaaggcccccgtggtgacaagggtgagacaggcgaacagggcgacagaggcataaagggtcaccgtggcttctctggcctccagggtccccctggccctcctggctctcctggtgaacaaggtccctctggagcctctggtcctgctggtccccgaggtccccctggctctgctggtgctcctggcaaagatggactcaacggtctccctggccccattgggccccctggtcctcgcggtcgcactggtgatgctggtcctgttggtccccccggccctcctggacctcctggtccccctggtcctcccagcgctggtttcgacttcagcttcctgccccagccacctcaagagaaggctcacgatggtggccgctactaccgggctgatgatgccaatgtggttcgtgaccgtgacctcgaggtggacaccaccctcaagagcctgagccagcagatcgagaacatccggagcccagagggcagccgcaagaaccccgcccgcacctgccgtgacctcaagatgtgccactctgactggaagagtggagagtactggattgaccccaaccaaggctgcaacctggatgccatcaaagtcttctgcaacatggagactggtgagacctgcgtgtaccccactcagcccagtgtggcccagaagaactggtacatcagcaagaaccccaaggacaagaggcatgtctggttcggcgagagcatgaccgatggattccagttcgagtatggcggccagggctccgaccctgccgatgtggccatccagctgaccttcctgcgcctgatgtccaccgaggcctcccagaacatcacctaccactgcaagaacagcgtggcctacatggaccagcagactggcaacctcaagaaggccctgctcctccagggctccaacgagatcgagatccgcgccgagggcaacagccgcttcacctacagcgtcactgtcgatggctgcacgagtcacaccggagcctggggcaagacagtgattgaatacaaaaccaccaagacctcccgcctgcccatcatcgatgtggcccccttggacgttggtgccccagaccaggaattcggcttcgacgttggccctgtctgcttcctgtaaactccctccatcccaacctggctccctcccacccaaccaactttccccccaacccggaaacagacaagcaacccaaactgaaccccctcaaaagccaaaaaatgggagacaatttcacatggactttggaaaatatttttttcctttgcattcatctctcaaacttagtttttatctttgaccaaccgaacatgaccaaaaaccaaaagtgcattcaaccttaccaaaaaaaaaaaaaaaaaaagaataaataaataactttttaaaaaaggaagcttggtccacttgcttgaagacccatgcgggggtaagtccctttctgcccgttgggcttatgaaaccccaatgctgccctttctgctcctttctccacaccccccttggggcctcccctccactccttcccaaatctgtctccccagaagacacaggaaacaatgtattgtctgcccagcaatcaaaggcaatgctcaaacacccaagtggcccccaccctcagcccgctcctgcccgcccagcacccccaggccctgggggacctggggttctcagactgccaaagaagccttgccatctggcgctcccatggctcttgcaacatctccccttcgtttttgagggggtcatgccgggggagccaccagcccctcactgggttcggaggagagtcaggaagggccacgacaaagcagaaacatcggatttggggaacgcgtgtcaatcccttgtgccgcagggctgggcgggagagactgttctgttccttgtgtaactgtgttgctgaaagactacctcgttcttgtcttgatgtgtcaccggggcaactgcctgggggcggggatgggggcagggtggaagcggctccccattttataccaaaggtgctacatctatgtgatgggtggggtggggagggaatcactggtgctatagaaattgagatgcccccccaggccagcaaatgttcctttttgttcaaagtctatttttattccttgatatttttctttttttttttttttttttgtggatggggacttgtgaatttttctaaaggtgctatttaacatgggaggagagcgtgtgcggctccagcccagcccgctgctcactttccaccctctctccacctgcctctggcttctcaggcctctgctctccgacctctctcctctgaaaccctcctccacagctgcagcccatcctcccggctccctcctagtctgtcctgcgtcctctgtccccgggtttcagagacaacttcccaaagcacaaagcagtttttccccctaggggtgggaggaagcaaaagactctgtacctattttgtatgtgtataataatttgagatgtttttaattattttgattgctggaataaagcatgtggaaatgacccaaacataatcgtcggagcagacgggagtttctcctcggggtcggagcaggaggcacgcggagtgtgaggccacgcatgagcggacgctaaccccctccccagccacaaagagtctacatgtctagggtctagacatgttcagctttgtggacctccggctcctgctcctcttagcggccaccgccctcctgacgcacggccaagaggaaggccaagtcgagggccaagacgaagacatcccaccaatcacctgcgtacagaacggcctcaggtaccatgaccgagacgtgtggaaacccgagccctgccggatctgcgtctgcgacaacggcaaggtgttgtgcgatgacgtgatctgtgacgagaccaagaactgccccggcgccgaagtccccgagggcgagtgctgtcccgtctgccccgacggctcagagtcacccaccgaccaagaaaccaccggcgtcgagggacccaagggagacactggcccccgaggcccaaggggacccgcaggcccccctggccgagatggcatccctggacagcctggacttcccggaccccccggaccccccggacctcccggaccccctggcctcggaggaaactttgctccccagctgtcttatggctatgatgagaaatcaaccggaggaatttccgtgcctggccccatgggtccctctggtcctcgtggtctccctggcccccctggtgcacctggtccccaaggcttccaaggtccccctggtgagcctggcgagcctggagcttcaggtcccatgggtccccgaggtcccccaggtccccctggaaagaatggagatgatggggaagctggaaaacctggtcgtcctggtgagcgtgggcctcctgggcctcagggtgctcgaggattgcccggaacagctggcctccctggaatgaagggacacagaggtttcagtggtttggatggtgccaagggagatgctggtcctgctggtcctaagggtgagcctggcagccctggtgaaaatggagctcctggtcagatgggcccccgtggcctgcctggtgagagaggtcgccctggagcccctggccctgctggtgctcgtggaaatgatggtgctactggtgctgccgggccccctggtcccaccggccccgctggtcctcctggcttccctggtgctgttggtgctaagggtgaagctggtccccaagggccccgaggctctgaaggtccccagggtgtgcgtggtgagcctggcccccctggccctgctggtgctgctggccctgctggaaaccctggtgctgatggacagcctggtgctaaaggtgccaatggtgctcctggtattgctggtgctcctggcttccctggtgcccgaggcccctctggaccccagggccccggcggccctcctggtcccaagggtaacagcggtgaacctggtgctcctggcagcaaaggagacactggtgctaagggagagcctggccctgttggtgttcaaggaccccctggccctgctggagaggaaggaaagcgaggagctcgaggtgaacccggacccactggcctgcccggaccccctggcgagcgtggtggacctggtagccgtggtttccctggcgcagatggtgttgctggtcccaagggtcccgctggtgaacgtggttctcctggccctgctggccccaaaggatctcctggtgaagctggtcgtcccggtgaagctggtctgcctggtgccaagggtctgactggaagccctggcagccctggtcctgatggcaaaactggcccccctggtcccgccggtcaagatggtcgccccggacccccaggcccacctggtgcccgtggtcaggctggtgtgatgggattccctggacctaaaggtgctgctggagagcccggcaaggctggagagcgaggtgttcccggaccccctggcgctgtcggtcctgctggcaaagatggagaggctggagctcagggaccccctggccctgctggtcccgctggcgagagaggtgaacaaggccctgctggctcccccggattccagggtctccctggtcctgctggtcctccaggtgaagcaggcaaacctggtgaacagggtgttcctggagaccttggcgcccctggcccctctggagcaagaggcgagagaggtttccctggcgagcgtggtgtgcaaggtccccctggtcctgctggtccccgaggggccaacggtgctcccggcaacgatggtgctaagggtgatgctggtgcccctggagctcccggtagccagggcgcccctggccttcagggaatgcctggtgaacgtggtgcagctggtcttccagggcctaagggtgacagaggtgatgctggtcccaaaggtgctgatggctctcctggcaaagatggcgtccgtggtctgactggccccattggtcctcctggccctgctggtgcccctggtgacaagggtgaaagtggtcccagcggccctgctggtcccactggagctcgtggtgcccccggagaccgtggtgagcctggtccccccggccctgctggctttgctggcccccctggtgctgacggccaacctggtgctaaaggcgaacctggtgatgctggtgctaaaggcgatgctggtccccctggccctgccggacccgctggaccccctggccccattggtaatgttggtgctcctggagccaaaggtgctcgcggcagcgctggtccccctggtgctactggtttccctggtgctgctggccgagtcggtcctcctggcccctctggaaatgctggaccccctggccctcctggtcctgctggcaaagaaggcggcaaaggtccccgtggtgagactggccctgctggacgtcctggtgaagttggtccccctggtccccctggccctgctggcgagaaaggatcccctggtgctgatggtcctgctggtgctcctggtactcccgggcctcaaggtattgctggacagcgtggtgtggtcggcctgcctggtcagagaggagagagaggcttccctggtcttcctggcccctctggtgaacctggcaaacaaggtccctctggagcaagtggtgaacgtggtccccctggtcccatgggcccccctggattggctggaccccctggtgaatctggacgtgagggggctcctggtgccgaaggttcccctggacgagacggttctcctggcgccaagggtgaccgtggtgagaccggccccgctggaccccctggtgctcctggtgctcctggtgcccctggccccgttggccctgctggcaagagtggtgatcgtggtgagactggtcctgctggtcccaccggtcctgtcggccctgttggcgcccgtggccccgccggaccccaaggcccccgtggtgacaagggtgagacaggcgaacagggcgacagaggcataaagggtcaccgtggcttctctggcctccagggtccccctggccctcctggctctcctggtgaacaaggtccctctggagcctctggtcctgctggtccccgaggtccccctggctctgctggtgctcctggcaaagatggactcaacggtctccctggccccattgggccccctggtcctcgcggtcgcactggtgatgctggtcctgttggtccccccggccctcctggacctcctggtccccctggtcctcccagcgctggtttcgacttcagcttcctgccccagccacctcaagagaaggctcacgatggtggccgctactaccgggctgatgatgccaatgtggttcgtgaccgtgacctcgaggtggacaccaccctcaagagcctgagccagcagatcgagaacatccggagcccagagggcagccgcaagaaccccgcccgcacctgccgtgacctcaagatgtgccactctgactggaagagtggagagtactggattgaccccaaccaaggctgcaacctggatgccatcaaagtcttctgcaacatggagactggtgagacctgcgtgtaccccactcagcccagtgtggcccagaagaactggtacatcagcaagaaccccaaggacaagaggcatgtctggttcggcgagagcatgaccgatggattccagttcgagtatggcggccagggctccgaccctgccgatgtggccatccagctgaccttcctgcgcctgatgtccaccgaggcctcccagaacatcacctaccactgcaagaacagcgtggcctacatggaccagcagactggcaacctcaagaaggccctgctcctccagggctccaacgagatcgagatccgcgccgagggcaacagccgcttcacctacagcgtcactgtcgatggctgcacgagtcacaccggagcctggggcaagacagtgattgaatacaaaaccaccaagacctcccgcctgcccatcatcgatgtggcccccttggacgttggtgccccagaccaggaattcggcttcgacgttggccctgtctgcttcctgtaaactccctccatcccaacctggctccctcccacccaaccaactttccccccaacccggaaacagacaagcaacccaaactgaaccccctcaaaagccaaaaaatgggagacaatttcacatggactttggaaaatatttttttcctttgcattcatctctcaaacttagtttttatctttgaccaaccgaacatgaccaaaaaccaaaagtgcattcaaccttaccaaaaaaaaaaaaaaaaaaagaataaataaataactttttaaaaaaggaagcttggtccacttgcttgaagacccatgcgggggtaagtccctttctgcccgttgggcttatgaaaccccaatgctgccctttctgctcctttctccacaccccccttggggcctcccctccactccttcccaaatctgtctccccagaagacacaggaaacaatgtattgtctgcccagcaatcaaaggcaatgctcaaacacccaagtggcccccaccctcagcccgctcctgcccgcccagcacccccaggccctgggggacctggggttctcagactgccaaagaagccttgccatctggcgctcccatggctcttgcaacatctccccttcgtttttgagggggtcatgccgggggagccaccagcccctcactgggttcggaggagagtcaggaagggccacgacaaagcagaaacatcggatttggggaacgcgtgtcaatcccttgtgccgcagggctgggcgggagagactgttctgttccttgtgtaactgtgttgctgaaagactacctcgttcttgtcttgatgtgtcaccggggcaactgcctgggggcggggatgggggcagggtggaagcggctccccattttataccaaaggtgctacatctatgtgatgggtggggtggggagggaatcactggtgctatagaaattgagatgcccccccaggccagcaaatgttcctttttgttcaaagtctatttttattccttgatatttttctttttttttttttttttttgtggatggggacttgtgaatttttctaaaggtgctatttaacatgggaggagagcgtgtgcggctccagcccagcccgctgctcactttccaccctctctccacctgcctctggcttctcaggcctctgctctccgacctctctcctctgaaaccctcctccacagctgcagcccatcctcccggctccctcctagtctgtcctgcgtcctctgtccccgggtttcagagacaacttcccaaagcacaaagcagtttttccccctaggggtgggaggaagcaaaagactctgtacctattttgtatgtgtataataatttgagatgtttttaattattttgattgctggaataaagcatgtggaaatgacccaaacataatcgtcggagcagacgggagtttctcctcggggtcggagcaggaggcacgcggagtgtgaggccacgcatgagcggacgctaaccccctccccagccacaaagagtctacatgtctagggtctagacatgttcagctttgtggacctccggctcctgctcctcttagcggccaccgccctcctgacgcacggccaagaggaaggccaagtcgagggccaagacgaagacatcccaccaatcacctgcgtacagaacggcctcaggtaccatgaccgagacgtgtggaaacccgagccctgccggatctgcgtctgcgacaacggcaaggtgttgtgcgatgacgtgatctgtgacgagaccaagaactgccccggcgccgaagtccccgagggcgagtgctgtcccgtctgccccgacggctcagagtcacccaccgaccaagaaaccaccggcgtcgagggacccaagggagacactggcccccgaggcccaaggggacccgcaggcccccctggccgagatggcatccctggacagcctggacttcccggaccccccggaccccccggacctcccggaccccctggcctcggaggaaactttgctccccagctgtcttatggctatgatgagaaatcaaccggaggaatttccgtgcctggccccatgggtccctctggtcctcgtggtctccctggcccccctggtgcacctggtccccaaggcttccaaggtccccctggtgagcctggcgagcctggagcttcaggtcccatgggtccccgaggtcccccaggtccccctggaaagaatggagatgatggggaagctggaaaacctggtcgtcctggtgagcgtgggcctcctgggcctcagggtgctcgaggattgcccggaacagctggcctccctggaatgaagggacacagaggtttcagtggtttggatggtgccaagggagatgctggtcctgctggtcctaagggtgagcctggcagccctggtgaaaatggagctcctggtcagatgggcccccgtggcctgcctggtgagagaggtcgccctggagcccctggccctgctggtgctcgtggaaatgatggtgctactggtgctgccgggccccctggtcccaccggccccgctggtcctcctggcttccctggtgctgttggtgctaagggtgaagctggtccccaagggccccgaggctctgaaggtccccagggtgtgcgtggtgagcctggcccccctggccctgctggtgctgctggccctgctggaaaccctggtgctgatggacagcctggtgctaaaggtgccaatggtgctcctggtattgctggtgctcctggcttccctggtgcccgaggcccctctggaccccagggccccggcggccctcctggtcccaagggtaacagcggtgaacctggtgctcctggcagcaaaggagacactggtgctaagggagagcctggccctgttggtgttcaaggaccccctggccctgctggagaggaaggaaagcgaggagctcgaggtgaacccggacccactggcctgcccggaccccctggcgagcgtggtggacctggtagccgtggtttccctggcgcagatggtgttgctggtcccaagggtcccgctggtgaacgtggttctcctggccctgctggccccaaaggatctcctggtgaagctggtcgtcccggtgaagctggtctgcctggtgccaagggtctgactggaagccctggcagccctggtcctgatggcaaaactggcccccctggtcccgccggtcaagatggtcgccccggacccccaggcccacctggtgcccgtggtcaggctggtgtgatgggattccctggacctaaaggtgctgctggagagcccggcaaggctggagagcgaggtgttcccggaccccctggcgctgtcggtcctgctggcaaagatggagaggctggagctcagggaccccctggccctgctggtcccgctggcgagagaggtgaacaaggccctgctggctcccccggattccagggtctccctggtcctgctggtcctccaggtgaagcaggcaaacctggtgaacagggtgttcctggagaccttggcgcccctggcccctctggagcaagaggcgagagaggtttccctggcgagcgtggtgtgcaaggtccccctggtcctgctggtccccgaggggccaacggtgctcccggcaacgatggtgctaagggtgatgctggtgcccctggagctcccggtagccagggcgcccctggccttcagggaatgcctggtgaacgtggtgcagctggtcttccagggcctaagggtgacagaggtgatgctggtcccaaaggtgctgatggctctcctggcaaagatggcgtccgtggtctgactggccccattggtcctcctggccctgctggtgcccctggtgacaagggtgaaagtggtcccagcggccctgctggtcccactggagctcgtggtgcccccggagaccgtggtgagcctggtccccccggccctgctggctttgctggcccccctggtgctgacggccaacctggtgctaaaggcgaacctggtgatgctggtgctaaaggcgatgctggtccccctggccctgccggacccgctggaccccctggccccattggtaatgttggtgctcctggagccaaaggtgctcgcggcagcgctggtccccctggtgctactggtttccctggtgctgctggccgagtcggtcctcctggcccctctggaaatgctggaccccctggccctcctggtcctgctggcaaagaaggcggcaaaggtccccgtggtgagactggccctgctggacgtcctggtgaagttggtccccctggtccccctggccctgctggcgagaaaggatcccctggtgctgatggtcctgctggtgctcctggtactcccgggcctcaaggtattgctggacagcgtggtgtggtcggcctgcctggtcagagaggagagagaggcttccctggtcttcctggcccctctggtgaacctggcaaacaaggtccctctggagcaagtggtgaacgtggtccccctggtcccatgggcccccctggattggctggaccccctggtgaatctggacgtgagggggctcctggtgccgaaggttcccctggacgagacggttctcctggcgccaagggtgaccgtggtgagaccggccccgctggaccccctggtgctcctggtgctcctggtgcccctggccccgttggccctgctggcaagagtggtgatcgtggtgagactggtcctgctggtcccaccggtcctgtcggccctgttggcgcccgtggccccgccggaccccaaggcccccgtggtgacaagggtgagacaggcgaacagggcgacagaggcataaagggtcaccgtggcttctctggcctccagggtccccctggccctcctggctctcctggtgaacaaggtccctctggagcctctggtcctgctggtccccgaggtccccctggctctgctggtgctcctggcaaagatggactcaacggtctccctggccccattgggccccctggtcctcgcggtcgcactggtgatgctggtcctgttggtccccccggccctcctggacctcctggtccccctggtcctcccagcgctggtttcgacttcagcttcctgccccagccacctcaagagaaggctcacgatggtggccgctactaccgggctgatgatgccaatgtggttcgtgaccgtgacctcgaggtggacaccaccctcaagagcctgagccagcagatcgagaacatccggagcccagagggcagccgcaagaaccccgcccgcacctgccgtgacctcaagatgtgccactctgactggaagagtggagagtactggattgaccccaaccaaggctgcaacctggatgccatcaaagtcttctgcaacatggagactggtgagacctgcgtgtaccccactcagcccagtgtggcccagaagaactggtacatcagcaagaaccccaaggacaagaggcatgtctggttcggcgagagcatgaccgatggattccagttcgagtatggcggccagggctccgaccctgccgatgtggccatccagctgaccttcctgcgcctgatgtccaccgaggcctcccagaacatcacctaccactgcaagaacagcgtggcctacatggaccagcagactggcaacctcaagaaggccctgctcctccagggctccaacgagatcgagatccgcgccgagggcaacagccgcttcacctacagcgtcactgtcgatggctgcacgagtcacaccggagcctggggcaagacagtgattgaatacaaaaccaccaagacctcccgcctgcccatcatcgatgtggcccccttggacgttggtgccccagaccaggaattcggcttcgacgttggccctgtctgcttcctgtaaactccctccatcccaacctggctccctcccacccaaccaactttccccccaacccggaaacagacaagcaacccaaactgaaccccctcaaaagccaaaaaatgggagacaatttcacatggactttggaaaatatttttttcctttgcattcatctctcaaacttagtttttatctttgaccaaccgaacatgaccaaaaaccaaaagtgcattcaaccttaccaaaaaaaaaaaaaaaaaaagaataaataaataactttttaaaaaaggaagcttggtccacttgcttgaagacccatgcgggggtaagtccctttctgcccgttgggcttatgaaaccccaatgctgccctttctgctcctttctccacaccccccttggggcctcccctccactccttcccaaatctgtctccccagaagacacaggaaacaatgtattgtctgcccagcaatcaaaggcaatgctcaaacacccaagtggcccccaccctcagcccgctcctgcccgcccagcacccccaggccctgggggacctggggttctcagactgccaaagaagccttgccatctggcgctcccatggctcttgcaacatctccccttcgtttttgagggggtcatgccgggggagccaccagcccctcactgggttcggaggagagtcaggaagggccacgacaaagcagaaacatcggatttggggaacgcgtgtcaatcccttgtgccgcagggctgggcgggagagactgttctgttccttgtgtaactgtgttgctgaaagactacctcgttcttgtcttgatgtgtcaccggggcaactgcctgggggcggggatgggggcagggtggaagcggctccccattttataccaaaggtgctacatctatgtgatgggtggggtggggagggaatcactggtgctatagaaattgagatgcccccccaggccagcaaatgttcctttttgttcaaagtctatttttattccttgatatttttctttttttttttttttttttgtggatggggacttgtgaatttttctaaaggtgctatttaacatgggaggagagcgtgtgcggctccagcccagcccgctgctcactttccaccctctctccacctgcctctggcttctcaggcctctgctctccgacctctctcctctgaaaccctcctccacagctgcagcccatcctcccggctccctcctagtctgtcctgcgtcctctgtccccgggtttcagagacaacttcccaaagcacaaagcagtttttccccctaggggtgggaggaagcaaaagactctgtacctattttgtatgtgtataataatttgagatgtttttaattattttgattgctggaataaagcatgtggaaatgacccaaacataatcgtcggagcagacgggagtttctcctcggggtcggagcaggaggcacgcggagtgtgaggccacgcatgagcggacgctaaccccctccccagccacaaagagtctacatgtctagggtctagacatgttcagctttgtggacctccggctcctgctcctcttagcggccaccgccctcctgacgcacggccaagaggaaggccaagtcgagggccaagacgaagacatcccaccaatcacctgcgtacagaacggcctcaggtaccatgaccgagacgtgtggaaacccgagccctgccggatctgcgtctgcgacaacggcaaggtgttgtgcgatgacgtgatctgtgacgagaccaagaactgccccggcgccgaagtccccgagggcgagtgctgtcccgtctgccccgacggctcagagtcacccaccgaccaagaaaccaccggcgtcgagggacccaagggagacactggcccccgaggcccaaggggacccgcaggcccccctggccgagatggcatccctggacagcctggacttcccggaccccccggaccccccggacctcccggaccccctggcctcggaggaaactttgctccccagctgtcttatggctatgatgagaaatcaaccggaggaatttccgtgcctggccccatgggtccctctggtcctcgtggtctccctggcccccctggtgcacctggtccccaaggcttccaaggtccccctggtgagcctggcgagcctggagcttcaggtcccatgggtccccgaggtcccccaggtccccctggaaagaatggagatgatggggaagctggaaaacctggtcgtcctggtgagcgtgggcctcctgggcctcagggtgctcgaggattgcccggaacagctggcctccctggaatgaagggacacagaggtttcagtggtttggatggtgccaagggagatgctggtcctgctggtcctaagggtgagcctggcagccctggtgaaaatggagctcctggtcagatgggcccccgtggcctgcctggtgagagaggtcgccctggagcccctggccctgctggtgctcgtggaaatgatggtgctactggtgctgccgggccccctggtcccaccggccccgctggtcctcctggcttccctggtgctgttggtgctaagggtgaagctggtccccaagggccccgaggctctgaaggtccccagggtgtgcgtggtgagcctggcccccctggccctgctggtgctgctggccctgctggaaaccctggtgctgatggacagcctggtgctaaaggtgccaatggtgctcctggtattgctggtgctcctggcttccctggtgcccgaggcccctctggaccccagggccccggcggccctcctggtcccaagggtaacagcggtgaacctggtgctcctggcagcaaaggagacactggtgctaagggagagcctggccctgttggtgttcaaggaccccctggccctgctggagaggaaggaaagcgaggagctcgaggtgaacccggacccactggcctgcccggaccccctggcgagcgtggtggacctggtagccgtggtttccctggcgcagatggtgttgctggtcccaagggtcccgctggtgaacgtggttctcctggccctgctggccccaaaggatctcctggtgaagctggtcgtcccggtgaagctggtctgcctggtgccaagggtctgactggaagccctggcagccctggtcctgatggcaaaactggcccccctggtcccgccggtcaagatggtcgccccggacccccaggcccacctggtgcccgtggtcaggctggtgtgatgggattccctggacctaaaggtgctgctggagagcccggcaaggctggagagcgaggtgttcccggaccccctggcgctgtcggtcctgctggcaaagatggagaggctggagctcagggaccccctggccctgctggtcccgctggcgagagaggtgaacaaggccctgctggctcccccggattccagggtctccctggtcctgctggtcctccaggtgaagcaggcaaacctggtgaacagggtgttcctggagaccttggcgcccctggcccctctggagcaagaggcgagagaggtttccctggcgagcgtggtgtgcaaggtccccctggtcctgctggtccccgaggggccaacggtgctcccggcaacgatggtgctaagggtgatgctggtgcccctggagctcccggtagccagg

SEQ ID NO: 825 - DNA, 32765 bp, Homo sapiens
  misc_feature (973)..(973): second gene starts at position 973
atgctgggtggatccggatcgcatggaagacgcagcctggccgcgctctcccaaatcgcctaccagaggaatgacgatgatgaagaggaggcagcccgggaacggcgccgccgagcccgacaggaacggctgcggcagaagcaggaggaagaatccttgggacaggtgaccgaccaggtggaggtgaatgcccagaacagtgtgcctgacgaggaggccaagacaaccaccacaaacactcaagtggaaggggatgatgaggccgcattcctggagcgcctggctcggcgtgaggaaagacgccaaaaacgccttcaggaggctctggagcggcagaaggagttcgacccaacaataacagatgcaagtctgtcgctcccaagcagaagaatgcaaaatgacacagcagaaaatgaaactaccgagaaggaagaaaaaagtgaaagtcgccaagaaagatacgagatagaggaaacagaaacagtcaccaagtcctaccagaagaatgattggagggatgctgaagaaaacaagaaagaagacaaggaaaaggaggaggaggaagaggagaagccaaagcgagggagcattggagaaaatcagatcaaagatgaaaagattaaaaaggacaaagaacccaaagaagaagttaagagcttcatggatcgaaagaagggatttacagaagttaagtcgcagaatggagaattcatgacccacaaacttaaacatactgagaatactttcagccgccctggagggagggccagcgtggacaccaaggaggctgagggcgccccccaggtggaagccggcaaaaggctggaggagcttcgtcgtcgtcgcggggagaccgagagcgaagagttcgagaagctcaaacagaagcagcaggaggcggctttggagctggaggaactcaagaaaaagagggaggagagaaggaaggtcctggaggaggaagagcagaggctcctgctcctcttagcggccaccgccctcctgacgcacggccaagaggaaggccaagtcgagggccaagacgaagacatcccaccaatcacctgcgtacagaacggcctcaggtaccatgaccgagacgtgtggaaacccgagccctgccggatctgcgtctgcgacaacggcaaggtgttgtgcgatgacgtgatctgtgacgagaccaagaactgccccggcgccgaagtccccgagggcgagtgctgtcccgtctgccccgacggctcagagtcacccaccgaccaagaaaccaccggcgtcgagggacccaagggagacactggcccccgaggcccaaggggacccgcaggcccccctggccgagatggcatccctggacagcctggacttcccggaccccccggaccccccggacctcccggaccccctggcctcggaggaaactttgctccccagctgtcttatggctatgatgagaaatcaaccggaggaatttccgtgcctggccccatgggtccctctggtcctcgtggtctccctggcccccctggtgcacctggtccccaaggcttccaaggtccccctggtgagcctggcgagcctggagcttcaggtcccatgggtccccgaggtcccccaggtccccctggaaagaatggagatgatggggaagctggaaaacctggtcgtcctggtgagcgtgggcctcctgggcctcagggtgctcgaggattgcccggaacagctggcctccctggaatgaagggacacagaggtttcagtggtttggatggtgccaagggagatgctggtcctgctggtcctaagggtgagcctggcagccctggtgaaaatggagctcctggtcagatgggcccccgtggcctgcctggtgagagaggtcgccctggagcccctggccctgctggtgctcgtggaaatgatggtgctactggtgctgccgggccccctggtcccaccggccccgctggtcctcctggcttccctggtgctgttggtgctaagggtgaagctggtccccaagggccccgaggctctgaaggtccccagggtgtgcgtggtgagcctggcccccctggccctgctggtgctgctggccctgctggaaaccctggtgctgatggacagcctggtgctaaaggtgccaatggtgctcctggtattgctggtgctcctggcttccctggtgcccgaggcccctctggaccccagggccccggcggccctcctggtcccaagggtaacagcggtgaacctggtgctcctggcagcaaaggagacactggtgctaagggagagcctggccctgttggtgttcaaggaccccctggccctgctggagaggaaggaaagcgaggagctcgaggtgaacccggacccactggcctgcccggaccccctggcgagcgtggtggacctggtagccgtggtttccctggcgcagatggtgttgctggtcccaagggtcccgctggtgaacgtggttctcctggccctgctggccccaaaggatctcctggtgaagctggtcgtcccggtgaagctggtctgcctggtgccaagggtctgactggaagccctggcagccctggtcctgatggcaaaactggcccccctggtcccgccggtcaagatggtcgccccggacccccaggcccacctggtgcccgtggtcaggctggtgtgatgggattccctggacctaaaggtgctgctggagagcccggcaaggctggagagcgaggtgttcccggaccccctggcgctgtcggtcctgctggcaaagatggagaggctggagctcagggaccccctggccctgctggtcccgctggcgagagaggtgaacaaggccctgctggctcccccggattccagggtctccctggtcctgctggtcctccaggtgaagcaggcaaacctggtgaacagggtgttcctggagaccttggcgcccctggcccctctggagcaagaggcgagagaggtttccctggcgagcgtggtgtgcaaggtccccctggtcctgctggtccccgaggggccaacggtgctcccggcaacgatggtgctaagggtgatgctggtgcccctggagctcccggtagccagggcgcccctggccttcagggaatgcctggtgaacgtggtgcagctggtcttccagggcctaagggtgacagaggtgatgctggtcccaaaggtgctgatggctctcctggcaaagatggcgtccgtggtctgactggccccattggtcctcctggccctgctggtgcccctggtgacaagggtgaaagtggtcccagcggccctgctggtcccactggagctcgtggtgcccccggagaccgtggtgagcctggtccccccggccctgctggctttgctggcccccctggtgctgacggccaacctggtgctaaaggcgaacctggtgatgctggtgctaaaggcgatgctggtccccctggccctgccggacccgctggaccccctggccccattggtaatgttggtgctcctggagccaaaggtgctcgcggcagcgctggtccccctggtgctactggtttccctggtgctgctggccgagtcggtcctcctggcccctctggaaatgctggaccccctggccctcctggtcctgctggcaaagaaggcggcaaaggtccccgtggtgagactggccctgctggacgtcctggtgaagttggtccccctggtccccctggccctgctggcgagaaaggatcccctggtgctgatggtcctgctggtgctcctggtactcccgggcctcaaggtattgctggacagcgtggtgtggtcggcctgcctggtcagagaggagagagaggcttccctggtcttcctggcccctctggtgaacctggcaaacaaggtccctctggagcaagtggtgaacgtggtccccctggtcccatgggcccccctggattggctggaccccctggtgaatctggacgtgagggggctcctggtgccgaaggttcccctggacgagacggttctcctggcgccaagggtgaccgtggtgagaccggccccgctggaccccctggtgctcctggtgctcctggtgcccctggccccgttggccctgctggcaagagtggtgatcgtggtgagactggtcctgctggtcccaccggtcctgtcggccctgttggcgcccgtggccccgccggaccccaaggcccccgtggtgacaagggtgagacaggcgaacagggcgacagaggcataaagggtcaccgtggcttctctggcctccagggtccccctggccctcctggctctcctggtgaacaaggtccctctggagcctctggtcctgctggtccccgaggtccccctggctctgctggtgctcctggcaaagatggactcaacggtctccctggccccattgggccccctggtcctcgcggtcgcactggtgatgctggtcctgttggtccccccggccctcctggacctcctggtccccctggtcctcccagcgctggtttcgacttcagcttcctgccccagccacctcaagagaaggctcacgatggtggccgctactaccgggctgatgatgccaatgtggttcgtgaccgtgacctcgaggtggacaccaccctcaagagcctgagccagcagatcgagaacatccggagcccagagggcagccgcaagaaccccgcccgcacctgccgtgacctcaagatgtgccactctgactggaagagtggagagtactggattgaccccaaccaaggctgcaacctggatgccatcaaagtcttctgcaacatggagactggtgagacctgcgtgtaccccactcagcccagtgtggcccagaagaactggtacatcagcaagaaccccaaggacaagaggcatgtctggttcggcgagagcatgaccgatggattccagttcgagtatggcggccagggctccgaccctgccgatgtggccatccagctgaccttcctgcgcctgatgtccaccgaggcctcccagaacatcacctaccactgcaagaacagcgtggcctacatggaccagcagactggcaacctcaagaaggccctgctcctccagggctccaacgagatcgagatccgcgccgagggcaacagccgcttcacctacagcgtcactgtcgatggctgcacgagtcacaccggagcctggggcaagacagtgattgaatacaaaaccaccaagacctcccgcctgcccatcatcgatgtggcccccttggacgttggtgccccagaccaggaattcggcttcgacgttggccctgtctgcttcctgtaaactccctccatcccaacctggctccctcccacccaaccaactttccccccaacccggaaacagacaagcaacccaaactgaaccccctcaaaagccaaaaaatgggagacaatttcacatggactttggaaaatatttttttcctttgcattcatctctcaaacttagtttttatctttgaccaaccgaacatgaccaaaaaccaaaagtgcattcaaccttaccaaaaaaaaaaaaaaaaaaagaataaataaataactttttaaaaaaggaagcttggtccacttgcttgaagacccatgcgggggtaagtccctttctgcccgttgggcttatgaaaccccaatgctgccctttctgctcctttctccacaccccccttggggcctcccctccactccttcccaaatctgtctccccagaagacacaggaaacaatgtattgtctgcccagcaatcaaaggcaatgctcaaacacccaagtggcccccaccctcagcccgctcctgcccgcccagcacccccaggccctgggggacctggggttctcagactgccaaagaagccttgccatctggcgctcccatggctcttgcaacatctccccttcgtttttgagggggtcatgccgggggagccaccagcccctcactgggttcggaggagagtcaggaagggccacgacaaagcagaaacatcggatttggggaacgcgtgtcaatcccttgtgccgcagggctgggcgggagagactgttctgttccttgtgtaactgtgttgctgaaagactacctcgttcttgtcttgatgtgtcaccggggcaactgcctgggggcggggatgggggcagggtggaagcggctccccattttataccaaaggtgctacatctatgtgatgggtggggtggggagggaatcactggtgctatagaaattgagatgcccccccaggccagcaaatgttcctttttgttcaaagtctatttttattccttgatatttttctttttttttttttttttttgtggatggggacttgtgaatttttctaaaggtgctatttaacatgggaggagagcgtgtgcggctccagcccagcccgctgctcactttccaccctctctccacctgcctctggcttctcaggcctctgctctccgacctctctcctctgaaaccctcctccacagctgcagcccatcctcccggctccctcctagtctgtcctgcgtcctctgtccccgggtttcagagacaacttcccaaagcacaaagcagtttttccccctaggggtgggaggaagcaaaagactctgtacctattttgtatgtgtataataatttgagatgtttttaattattttgattgctggaataaagcatgtggaaatgacccaaacataatcgtcggagcagacgggagtttctcctcggggtcggagcaggaggcacgcggagtgtgaggccacgcatgagcggacgctaaccccctccccagccacaaagagtctacatgtctagggtctagacatgttcagctttgtggacctccggctcctgctcctcttagcggccaccgccctcctgacgcacggccaagaggaaggccaagtcgagggccaagacgaagacatcccaccaatcacctgcgtacagaacggcctcaggtaccatgaccgagacgtgtggaaacccgagccctgccggatctgcgtctgcgacaacggcaaggtgttgtgcgatgacgtgatctgtgacgagaccaagaactgccccggcgccgaagtccccgagggcgagtgctgtcccgtctgccccgacggctcagagtcacccaccgaccaagaaaccaccggcgtcgagggacccaagggagacactggcccccgaggcccaaggggacccgcaggcccccctggccgagatggcatccctggacagcctggacttcccggaccccccggaccccccggacctcccggaccccctggcctcggaggaaactttgctccccagctgtcttatggctatgatgagaaatcaaccggaggaatttccgtgcctggccccatgggtccctctggtcctcgtggtctccctggcccccctggtgcacctggtccccaaggcttccaaggtccccctggtgagcctggcgagcctggagcttcaggtcccatgggtccccgaggtcccccaggtccccctggaaagaatggagatgatggggaagctggaaaacctggtcgtcctggtgagcgtgggcctcctgggcctcagggtgctcgaggattgcccggaacagctggcctccctggaatgaagggacacagaggtttcagtggtttggatggtgccaagggagatgctggtcctgctggtcctaagggtgagcctggcagccctggtgaaaatggagctcctggtcagatgggcccccgtggcctgcctggtgagagaggtcgccctggagcccctggccctgctggtgctcgtggaaatgatggtgctactggtgctgccgggccccctggtcccaccggccccgctggtcctcctggcttccctggtgctgttggtgctaagggtgaagctggtccccaagggccccgaggctctgaaggtccccagggtgtgcgtggtgagcctggcccccctggccctgctggtgctgctggccctgctggaaaccctggtgctgatggacagcctggtgctaaaggtgccaatggtgctcctggtattgctggtgctcctggcttccctggtgcccgaggcccctctggaccccagggccccggcggccctcctggtcccaagggtaacagcggtgaacctggtgctcctggcagcaaaggagacactggtgctaagggagagcctggccctgttggtgttcaaggaccccctggccctgctggagaggaaggaaagcgaggagctcgaggtgaacccggacccactggcctgcccggaccccctggcgagcgtggtggacctggtagccgtggtttccctggcgcagatggtgttgctggtcccaagggtcccgctggtgaacgtggttctcctggccctgctggccccaaaggatctcctggtgaagctggtcgtcccggtgaagctggtctgcctggtgccaagggtctgactggaagccctggcagccctggtcctgatggcaaaactggcccccctggtcccgccggtcaagatggtcgccccggacccccaggcccacctggtgcccgtggtcaggctggtgtgatgggattccctggacctaaaggtgctgctggagagcccggcaaggctggagagcgaggtgttcccggaccccctggcgctgtcggtcctgctggcaaagatggagaggctggagctcagggaccccctggccctgctggtcccgctggcgagagaggtgaacaaggccctgctggctcccccggattccagggtctccctggtcctgctggtcctccaggtgaagcaggcaaacctggtgaacagggtgttcctggagaccttggcgcccctggcccctctggagcaagaggcgagagaggtttccctggcgagcgtggtgtgcaaggtccccctggtcctgctggtccccgaggggccaacggtgctcccggcaacgatggtgctaagggtgatgctggtgcccctggagctcccggtagccagggcgcccctggccttcagggaatgcctggtgaacgtggtgcagctggtcttccagggcctaagggtgacagaggtgatgctggtcccaaaggtgctgatggctctcctggcaaagatggcgtccgtggtctgactggccccattggtcctcctggccctgctggtgcccctggtgacaagggtgaaagtggtcccagcggccctgctggtcccactggagctcgtggtgcccccggagaccgtggtgagcctggtccccccggccctgctggctttgctggcccccctggtgctgacggccaacctggtgctaaaggcgaacctggtgatgctggtgctaaaggcgatgctggtccccctggccctgccggacccgctggaccccctggccccattggtaatgttggtgctcctggagccaaaggtgctcgcggcagcgctggtccccctggtgctactggtttccctggtgctgctggccgagtcggtcctcctggcccctctggaaatgctggaccccctggccctcctggtcctgctggcaaagaaggcggcaaaggtccccgtggtgagactggccctgctggacgtcctggtgaagttggtccccctggtccccctggccctgctggcgagaaaggatcccctggtgctgatggtcctgctggtgctcctggtactcccgggcctcaaggtattgctggacagcgtggtgtggtcggcctgcctggtcagagaggagagagaggcttccctggtcttcctggcccctctggtgaacctggcaaacaaggtccctctggagcaagtggtgaacgtggtccccctggtcccatgggcccccctggattggctggaccccctggtgaatctggacgtgagggggctcctggtgccgaaggttcccctggacgagacggttctcctggcgccaagggtgaccgtggtgagaccggccccgctggaccccctggtgctcctggtgctcctggtgcccctggccccgttggccctgctggcaagagtggtgatcgtggtgagactggtcctgctggtcccaccggtcctgtcggccctgttggcgcccgtggccccgccggaccccaaggcccccgtggtgacaagggtgagacaggcgaacagggcgacagaggcataaagggtcaccgtggcttctctggcctccagggtccccctggccctcctggctctcctggtgaacaaggtccctctggagcctctggtcctgctggtccccgaggtccccctggctctgctggtgctcctggcaaagatggactcaacggtctccctggccccattgggccccctggtcctcgcggtcgcactggtgatgctggtcctgttggtccccccggccctcctggacctcctggtccccctggtcctcccagcgctggtttcgacttcagcttcctgccccagccacctcaagagaaggctcacgatggtggccgctactaccgggctgatgatgccaatgtggttcgtgaccgtgacctcgaggtggacaccaccctcaagagcctgagccagcagatcgagaacatccggagcccagagggcagccgcaagaaccccgcccgcacctgccgtgacctcaagatgtgccactctgactggaagagtggagagtactggattgaccccaaccaaggctgcaacctggatgccatcaaagtcttctgcaacatggagactggtgagacctgcgtgtaccccactcagcccagtgtggcccagaagaactggtacatcagcaagaaccccaaggacaagaggcatgtctggttcggcgagagcatgaccgatggattccagttcgagtatggcggccagggctccgaccctgccgatgtggccatccagctgaccttcctgcgcctgatgtccaccgaggcctcccagaacatcacctaccactgcaagaacagcgtggcctacatggaccagcagactggcaacctcaagaaggccctgctcctccagggctccaacgagatcgagatccgcgccgagggcaacagccgcttcacctacagcgtcactgtcgatggctgcacgagtcacaccggagcctggggcaagacagtgattgaatacaaaaccaccaagacctcccgcctgcccatcatcgatgtggcccccttggacgttggtgccccagaccaggaattcggcttcgacgttggccctgtctgcttcctgtaaactccctccatcccaacctggctccctcccacccaaccaactttccccccaacccggaaacagacaagcaacccaaactgaaccccctcaaaagccaaaaaatgggagacaatttcacatggactttggaaaatatttttttcctttgcattcatctctcaaacttagtttttatctttgaccaaccgaacatgaccaaaaaccaaaagtgcattcaaccttaccaaaaaaaaaaaaaaaaaaagaataaataaataactttttaaaaaaggaagcttggtccacttgcttgaagacccatgcgggggtaagtccctttctgcccgttgggcttatgaaaccccaatgctgccctttctgctcctttctccacaccccccttggggcctcccctccactccttcccaaatctgtctccccagaagacacaggaaacaatgtattgtctgcccagcaatcaaaggcaatgctcaaacacccaagtggcccccaccctcagcccgctcctgcccgcccagcacccccaggccctgggggacctggggttctcagactgccaaagaagccttgccatctggcgctcccatggctcttgcaacatctccccttcgtttttgagggggtcatgccgggggagccaccagcccctcactgggttcggaggagagtcaggaagggccacgacaaagcagaaacatcggatttggggaacgcgtgtcaatcccttgtgccgcagggctgggcgggagagactgttctgttccttgtgtaactgtgttgctgaaagactacctcgttcttgtcttgatgtgtcaccggggcaactgcctgggggcggggatgggggcagggtggaagcggctccccattttataccaaaggtgctacatctatgtgatgggtggggtggggagggaatcactggtgctatagaaattgagatgcccccccaggccagcaaatgttcctttttgttcaaagtctatttttattccttgatatttttctttttttttttttttttttgtggatggggacttgtgaatttttctaaaggtgctatttaacatgggaggagagcgtgtgcggctccagcccagcccgctgctcactttccaccctctctccacctgcctctggcttctcaggcctctgctctccgacctctctcctctgaaaccctcctccacagctgcagcccatcctcccggctccctcctagtctgtcctgcgtcctctgtccccgggtttcagagacaacttcccaaagcacaaagcagtttttccccctaggggtgggaggaagcaaaagactctgtacctattttgtatgtgtataataatttgagatgtttttaattattttgattgctggaataaagcatgtggaaatgacccaaacataatcgtcggagcagacgggagtttctcctcggggtcggagcaggaggcacgcggagtgtgaggccacgcatgagcggacgctaaccccctccccagccacaaagagtctacatgtctagggtctagacatgttcagctttgtggacctccggctcctgctcctcttagcggccaccgccctcctgacgcacggccaagaggaaggccaagtcgagggccaagacgaagacatcccaccaatcacctgcgtacagaacggcctcaggtaccatgaccgagacgtgtggaaacccgagccctgccggatctgcgtctgcgacaacggcaaggtgttgtgcgatgacgtgatctgtgacgagaccaagaactgccccggcgccgaagtccccgagggcgagtgctgtcccgtctgccccgacggctcagagtcacccaccgaccaagaaaccaccggcgtcgagggacccaagggagacactggcccccgaggcccaaggggacccgcaggcccccctggccgagatggcatccctggacagcctggacttcccggaccccccggaccccccggacctcccggaccccctggcctcggaggaaactttgctccccagctgtcttatggctatgatgagaaatcaaccggaggaatttccgtgcctggccccatgggtccctctggtcctcgtggtctccctggcccccctggtgcacctggtccccaaggcttccaaggtccccctggtgagcctggcgagcctggagcttcaggtcccatgggtccccgaggtcccccaggtccccctggaaagaatggagatgatggggaagctggaaaacctggtcgtcctggtgagcgtgggcctcctgggcctcagggtgctcgaggattgcccggaacagctggcctccctggaatgaagggacacagaggtttcagtggtttggatggtgccaagggagatgctggtcctgctggtcctaagggtgagcctggcagccctggtgaaaatggagctcctggtcagatgggcccccgtggcctgcctggtgagagaggtcgccctggagcccctggccctgctggtgctcgtggaaatgatggtgctactggtgctgccgggccccctggtcccaccggccccgctggtcctcctggcttccctggtgctgttggtgctaagggtgaagctggtccccaagggccccgaggctctgaaggtccccagggtgtgcgtggtgagcctggcccccctggccctgctggtgctgctggccctgctggaaaccctggtgctgatggacagcctggtgctaaaggtgccaatggtgctcctggtattgctggtgctcctggcttccctggtgcccgaggcccctctggaccccagggccccggcggccctcctggtcccaagggtaacagcggtgaacctggtgctcctggcagcaaaggagacactggtgctaagggagagcctggccctgttggtgttcaaggaccccctggccctgctggagaggaaggaaagcgaggagctcgaggtgaacccggacccactggcctgcccggaccccctggcgagcgtggtggacctggtagccgtggtttccctggcgcagatggtgttgctggtcccaagggtcccgctggtgaacgtggttctcctggccctgctggccccaaaggatctcctggtgaagctggtcgtcccggtgaagctggtctgcctggtgccaagggtctgactggaagccctggcagccctggtcctgatggcaaaactggcccccctggtcccgccggtcaagatggtcgccccggacccccaggcccacctggtgcccgtggtcaggctggtgtgatgggattccctggacctaaaggtgctgctggagagcccggcaaggctggagagcgaggtgttcccggaccccctggcgctgtcggtcctgctggcaaagatggagaggctggagctcagggaccccctggccctgctggtcccgctggcgagagaggtgaacaaggccctgctggctcccccggattccagggtctccctggtcctgctggtcctccaggtgaagcaggcaaacctggtgaacagggtgttcctggagaccttggcgcccctggcccctctggagcaagaggcgagagaggtttccctggcgagcgtggtgtgcaaggtccccctggtcctgctggtccccgaggggccaacggtgctcccggcaacgatggtgctaagggtgatgctggtgcccctggagctcccggtagccagggcgcccctggccttcagggaatgcctggtgaacgtggtgcagctggtcttccagggcctaagggtgacagaggtgatgctggtcccaaaggtgctgatggctctcctggcaaagatggcgtccgtggtctgactggccccattggtcctcctggccctgctggtgcccctggtgacaagggtgaaagtggtcccagcggccctgctggtcccactggagctcgtggtgcccccggagaccgtggtgagcctggtccccccggccctgctggctttgctggcccccctggtgctgacggccaacctggtgctaaaggcgaacctggtgatgctggtgctaaaggcgatgctggtccccctggccctgccggacccgctggaccccctggccccattggtaatgttggtgctcctggagccaaaggtgctcgcggcagcgctggtccccctggtgctactggtttccctggtgctgctggccgagtcggtcctcctggcccctctggaaatgctggaccccctggccctcctggtcctgctggcaaagaaggcggcaaaggtccccgtggtgagactggccctgctggacgtcctggtgaagttggtccccctggtccccctggccctgctggcgagaaaggatcccctggtgctgatggtcctgctggtgctcctggtactcccgggcctcaaggtattgctggacagcgtggtgtggtcggcctgcctggtcagagaggagagagaggcttccctggtcttcctggcccctctggtgaacctggcaaacaaggtccctctggagcaagtggtgaacgtggtccccctggtcccatgggcccccctggattggctggaccccctggtgaatctggacgtgagggggctcctggtgccgaaggttcccctggacgagacggttctcctggcgccaagggtgaccgtggtgagaccggccccgctggaccccctggtgctcctggtgctcctggtgcccctggccccgttggccctgctggcaagagtggtgatcgtggtgagactggtcctgctggtcccaccggtcctgtcggccctgttggcgcccgtggccccgccggaccccaaggcccccgtggtgacaagggtgagacaggcgaacagggcgacagaggcataaagggtcaccgtggcttctctggcctccagggtccccctggccctcctggctctcctggtgaacaaggtccctctggagcctctggtcctgctggtccccgaggtccccctggctctgctggtgctcctggcaaagatggactcaacggtctccctggccccattgggccccctggtcctcgcggtcgcactggtgatgctggtcctgttggtccccccggccctcctggacctcctggtccccctggtcctcccagcgctggtttcgacttcagcttcctgccccagccacctcaagagaaggctcacgatggtggccgctactaccgggctgatgatgccaatgtggttcgtgaccgtgacctcgaggtggacaccaccctcaagagcctgagccagcagatcgagaacatccggagcccagagggcagccgcaagaaccccgcccgcacctgccgtgacctcaagatgtgccactctgactggaagagtggagagtactggattgaccccaaccaaggctgcaacctggatgccatcaaagtcttctgcaacatggagactggtgagacctgcgtgtaccccactcagcccagtgtggcccagaagaactggtacatcagcaagaaccccaaggacaagaggcatgtctggttcggcgagagcatgaccgatggattccagttcgagtatggcggccagggctccgaccctgccgatgtggccatccagctgaccttcctgcgcctgatgtccaccgaggcctcccagaacatcacctaccactgcaagaacagcgtggcctacatggaccagcagactggcaacctcaagaaggccctgctcctccagggctccaacgagatcgagatccgcgccgagggcaacagccgcttcacctacagcgtcactgtcgatggctgcacgagtcacaccggagcctggggcaagacagtgattgaatacaaaaccaccaagacctcccgcctgcccatcatcgatgtggcccccttggacgttggtgccccagaccaggaattcggcttcgacgttggccctgtctgcttcctgtaaactccctccatcccaacctggctccctcccacccaaccaactttccccccaacccggaaacagacaagcaacccaaactgaaccccctcaaaagccaaaaaatgggagacaatttcacatggactttggaaaatatttttttcctttgcattcatctctcaaacttagtttttatctttgaccaaccgaacatgaccaaaaaccaaaagtgcattcaaccttaccaaaaaaaaaaaaaaaaaaagaataaataaataactttttaaaaaaggaagcttggtccacttgcttgaagacccatgcgggggtaagtccctttctgcccgttgggcttatgaaaccccaatgctgccctttctgctcctttctccacaccccccttggggcctcccctccactccttcccaaatctgtctccccagaagacacaggaaacaatgtattgtctgcccagcaatcaaaggcaatgctcaaacacccaagtggcccccaccctcagcccgctcctgcccgcccagcacccccaggccctgggggacctggggttctcagactgccaaagaagccttgccatctggcgctcccatggctcttgcaacatctccccttcgtttttgagggggtcatgccgggggagccaccagcccctcactgggttcggaggagagtcaggaagggccacgacaaagcagaaacatcggatttggggaacgcgtgtcaatcccttgtgccgcagggctgggcgggagagactgttctgttccttgtgtaactgtgttgctgaaagactacctcgttcttgtcttgatgtgtcaccggggcaactgcctgggggcggggatgggggcagggtggaagcggctccccattttataccaaaggtgctacatctatgtgatgggtggggtggggagggaatcactggtgctatagaaattgagatgcccccccaggccagcaaatgttcctttttgttcaaagtctatttttattccttgatatttttctttttttttttttttttttgtggatggggacttgtgaatttttctaaaggtgctatttaacatgggaggagagcgtgtgcggctccagcccagcccgctgctcactttccaccctctctccacctgcctctggcttctcaggcctctgctctccgacctctctcctctgaaaccctcctccacagctgcagcccatcctcccggctccctcctagtctgtcctgcgtcctctgtccccgggtttcagagacaacttcccaaagcacaaagcagtttttccccctaggggtgggaggaagcaaaagactctgtacctattttgtatgtgtataataatttgagatgtttttaattattttgattgctggaataaagcatgtggaaatgacccaaacataatcgtcggagcagacgggagtttctcctcggggtcggagcaggaggcacgcggagtgtgaggccacgcatgagcggacgctaaccccctccccagccacaaagagtctacatgtctagggtctagacatgttcagctttgtggacctccggctcctgctcctcttagcggccaccgccctcctgacgcacggccaagaggaaggccaagtcgagggccaagacgaagacatcccaccaatcacctgcgtacagaacggcctcaggtaccatgaccgagacgtgtggaaacccgagccctgccggatctgcgtctgcgacaacggcaaggtgttgtgcgatgacgtgatctgtgacgagaccaagaactgccccggcgccgaagtccccgagggcgagtgctgtcccgtctgccccgacggctcagagtcacccaccgaccaagaaaccaccggcgtcgagggacccaagggagacactggcccccgaggcccaaggggacccgcaggcccccctggccgagatggcatccctggacagcctggacttcccggaccccccggaccccccggacctcccggaccccctggcctcggaggaaactttgctccccagctgtcttatggctatgatgagaaatcaaccggaggaatttccgtgcctggccccatgggtccctctggtcctcgtggtctccctggcccccctggtgcacctggtccccaaggcttccaaggtccccctggtgagcctggcgagcctggagcttcaggtcccatgggtccccgaggtcccccaggtccccctggaaagaatggagatgatggggaagctggaaaacctggtcgtcctggtgagcgtgggcctcctgggcctcagggtgctcgaggattgcccggaacagctggcctccctggaatgaagggacacagaggtttcagtggtttggatggtgccaagggagatgctggtcctgctggtcctaagggtgagcctggcagccctggtgaaaatggagctcctggtcagatgggcccccgtggcctgcctggtgagagaggtcgccctggagcccctggccctgctggtgctcgtggaaatgatggtgctactggtgctgccgggccccctggtcccaccggccccgctggtcctcctggcttccctggtgctgttggtgctaagggtgaagctggtccccaagggccccgaggctctgaaggtccccagggtgtgcgtggtgagcctggcccccctggccctgctggtgctgctggccctgctggaaaccctggtgctgatggacagcctggtgctaaaggtgccaatggtgctcctggtattgctggtgctcctggcttccctggtgcccgaggcccctctggaccccagggccccggcggccctcctggtcccaagggtaacagcggtgaacctggtgctcctggcagcaaaggagacactggtgctaagggagagcctggccctgttggtgttcaaggaccccctggccctgctggagaggaaggaaagcgaggagctcgaggtgaacccggacccactggcctgcccggaccccctggcgagcgtggtggacctggtagccgtggtttccctggcgcagatggtgttgctggtcccaagggtcccgctggtgaacgtggttctcctggccctgctggccccaaaggatctcctggtgaagctggtcgtcccggtgaagctggtctgcctggtgccaagggtctgactggaagccctggcagccctggtcctgatggcaaaactggcccccctggtcccgccggtcaagatggtcgccccggacccccaggcccacctggtgcccgtggtcaggctggtgtgatgggattccctggacctaaaggtgctgctggagagcccggcaaggctggagagcgaggtgttcccggaccccctggcgctgtcggtcctgctggcaaagatggagaggctggagctcagggaccccctggccctgctggtcccgctggcgagagaggtgaacaaggccctgctggctcccccggattccagggtctccctggtcctgctggtcctccaggtgaagcaggcaaacctggtgaacagggtgttcctggagaccttggcgcccctggcccctctggagcaagaggcgagagaggtttccctggcgagcgtggtgtgcaaggtccccctggtcctgctggtccccgaggggccaacggtgctcccggcaacgatggtgctaagggtgatgctggtgcccctggagctcccggtagccagggcgcccctggccttcagggaatgcctggtgaacgtggtgcagctggtcttccagggcctaagggtgacagaggtgatgctggtcccaaaggtgctgatggctctcctggcaaagatggcgtccgtggtctgactggccccattggtcctcctggccctgctggtgcccctggtgacaagggtgaaagtggtcccagcggccctgctggtcccactggagctcgtggtgcccccggagaccgtggtgagcctggtccccccggccctgctggctttgctggcccccctggtgctgacggccaacctggtgctaaaggcgaacctggtgatgctggtgctaaaggcgatgctggtccccctggccctgccggacccgctggaccccctggccccattggtaatgttggtgctcctggagccaaaggtgctcgcggcagcgctggtccccctggtgctactggtttccctggtgctgctggccgagtcggtcctcctggcccctctggaaatgctggaccccctggccctcctggtcctgctggcaaagaaggcggcaaaggtccccgtggtgagactggccctgctggacgtcctggtgaagttggtccccctggtccccctggccctgctggcgagaaaggatcccctggtgctgatggtcctgctggtgctcctggtactcccgggcctcaaggtattgctggacagcgtggtgtggtcggcctgcctggtcagagaggagagagaggcttccctggtcttcctggcccctctggtgaacctggcaaacaaggtccctctggagcaagtggtgaacgtggtccccctggtcccatgggcccccctggattggctggaccccctggtgaatctggacgtgagggggctcctggtgccgaaggttcccctggacgagacggttctcctggcgccaagggtgaccgtggtgagaccggccccgctggaccccctggtgctcctggtgctcctggtgcccctggccccgttggccctgctggcaagagtggtgatcgtggtgagactggtcctgctggtcccaccggtcctgtcggccctgttggcgcccgtggccccgccggaccccaaggcccccgtggtgacaagggtgagacaggcgaacagggcgacagaggcataaagggtcaccgtggcttctctggcctccagggtccccctggccctcctggctctcctggtgaacaaggtccctctggagcctctggtcctgctggtccccgaggtccccctggctctgctggtgctcctggcaaagatggactcaacggtctccctggccccattgggccccctggtcctcgcggtcgcactggtgatgctggtcctgttggtccccccggccctcctggacctcctggtccccctggtcctcccagcgctggtttcgacttcagcttcctgccccagccacctcaagagaaggctcacgatggtggccgctactaccgggctgatgatgccaatgtggttcgtgaccgtgacctcgaggtggacaccaccctcaagagcctgagccagcagatcgagaacatccggagcccagagggcagccgcaagaaccccgcccgcacctgccgtgacctcaagatgtgccactctgactggaagagtggagagtactggattgaccccaaccaaggctgcaacctggatgccatcaaagtcttctgcaacatggagactggtgagacctgcgtgtaccccactcagcccagtgtggcccagaagaactggtacatcagcaagaaccccaaggacaagaggcatgtctggttcggcgagagcatgaccgatggattccagttcgagtatggcggccagggctccgaccctgccgatgtggccatccagctgaccttcctgcgcctgatgtccaccgaggcctcccagaacatcacctaccactgcaagaacagcgtggcctacatggaccagcagactggcaacctcaagaaggccctgctcctccagggctccaacgagatcgagatccgcgccgagggcaacagccgcttcacctacagcgtcactgtcgatggctgcacgagtcacaccggagcctggggcaagacagtgattgaatacaaaaccaccaagacctcccgcctgcccatcatcgatgtggcccccttggacgttggtgccccagaccaggaattcggcttcgacgttggccctgtctgcttcctgtaaactccctccatcccaacctggctccctcccacccaaccaactttccccccaacccggaaacagacaagcaacccaaactgaaccccctcaaaagccaaaaaatgggagacaatttcacatggactttggaaaatatttttttcctttgcattcatctctcaaacttagtttttatctttgaccaaccgaacatgaccaaaaaccaaaagtgcattcaaccttaccaaaaaaaaaaaaaaaaaaagaataaataaataactttttaaaaaaggaagcttggtccacttgcttgaagacccatgcgggggtaagtccctttctgcccgttgggcttatgaaaccccaatgctgccctttctgctcctttctccacaccccccttggggcctcccctccactccttcccaaatctgtctccccagaagacacaggaaacaatgtattgtctgcccagcaatcaaaggcaatgctcaaacacccaagtggcccccaccctcagcccgctcctgcccgcccagcacccccaggccctgggggacctggggttctcagactgccaaagaagccttgccatctggcgctcccatggctcttgcaacatctccccttcgtttttgagggggtcatgccgggggagccaccagcccctcactgggttcggaggagagtcaggaagggccacgacaaagcagaaacatcggatttggggaacgcgtgtcaatcccttgtgccgcagggctgggcgggagagactgttctgttccttgtgtaactgtgttgctgaaagactacctcgttcttgtcttgatgtgtcaccggggcaactgcctgggggcggggatgggggcagggtggaagcggctccccattttataccaaaggtgctacatctatgtgatgggtggggtggggagggaatcactggtgctatagaaattgagatgcccccccaggccagcaaatgttcctttttgttcaaagtctatttttattccttgatatttttctttttttttttttttttttgtggatggggacttgtgaatttttctaaaggtgctatttaacatgggaggagagcgtgtgcggctccagcccagcccgctgctcactttccaccctctctccacctgcctctggcttctcaggcctctgctctccgacctctctcctctgaaaccctcctccacagctgcagcccatcctcccggctccctcctagtctgtcctgcgtcctctgtccccgggtttcagagacaacttcccaaagcacaaagcagtttttccccctaggggtgggaggaagcaaaagactctgtacctattttgtatgtgtataataatttgagatgtttttaattattttgattgctggaataaagcatgtggaaatgacccaaacataatcgtcggagcagacgggagtttctcctcggggtcggagcaggaggcacgcggagtgtgaggccacgcatgagcggacgctaaccccctccccagccacaaagagtctacatgtctagggtctagacatgttcagctttgtggacctccggctcctgctcctcttagcggccaccgccctcctgacgcacggccaagaggaaggccaagtcgagggccaagacgaagacatcccaccaatcacctgcgtacagaacggcctcaggtaccatgaccgagacgtgtggaaacccgagccctgccggatctgcgtctgcgacaacggcaaggtgttgtgcgatgacgtgatctgtgacgagaccaagaactgccccggcgccgaagtccccgagggcgagtgctgtcccgtctgccccgacggctcagagtcacccaccgaccaagaaaccaccggcgtcgagggacccaagggagacactggcccccgaggcccaaggggacccgcaggcccccctggccgagatggcatccctggacagcctggacttcccggaccccccggaccccccggacctcccggaccccctggcctcggaggaaactttgctccccagctgtcttatggctatgatgagaaatcaaccggaggaatttccgtgcctggccccatgggtccctctggtcctcgtggtctccctggcccccctggtgcacctggtccccaaggcttccaaggtccccctggtgagcctggcgagcctggagcttcaggtcccatgggtccccgaggtcccccaggtccccctggaaagaatggagatgatggggaagctggaaaacctggtcgtcctggtgagcgtgggcctcctgggcctcagggtgctcgaggattgcccggaacagctggcctccctggaatgaagggacacagaggtttcagtggtttggatggtgccaagggagatgctggtcctgctggtcctaagggtgagcctggcagccctggtgaaaatggagctcctggtcagatgggcccccgtggcctgcctggtgagagaggtcgccctggagcccctggccctgctggtgctcgtggaaatgatggtgctactggtgctgccgggccccctggtcccaccggccccgctggtcctcctggcttccctggtgctgttggtgctaagggtgaagctggtccccaagggccccgaggctctgaaggtccccagggtgtgcgtggtgagcctggcccccctggccctgctggtgctgctggccctgctggaaaccctggtgctgatggacagcctggtgctaaaggtgccaatggtgctcctggtattgctggtgctcctggcttccctggtgcccgaggcccctctggaccccagggccccggcggccctcctggtcccaagggtaacagcggtgaacctggtgctcctggcagcaaaggagacactggtgctaagggagagcctggccctgttggtgttcaaggaccccctggccctgctggagaggaaggaaagcgaggagctcgaggtgaacccggacccactggcctgcccggaccccctggcgagcgtggtggacctggtagccgtggtttccctggcgcagatggtgttgctggtcccaagggtcccgctggtgaacgtggttctcctggccctgctggccccaaaggatctcctggtgaagctggtcgtcccggtgaagctggtctgcctggtgccaagggtctgactggaagccctggcagccctggtcctgatggcaaaactggcccccctggtcccgccggtcaagatggtcgccccggacccccaggcccacctggtgcccgtggtcaggctggtgtgatgggattccctggacctaaaggtgctgctggagagcccggcaaggctggagagcgaggtgttcccggaccccctggcgctgtcggtcctgctggcaaagatggagaggctggagctcagggaccccctggccctgctggtcccgctggcgagagaggtgaacaaggccctgctggctcccccggattccagggtctccctggtcctgctggtcctccaggtgaagcaggcaaacctggtgaacagggtgttcctggagaccttggcgcccctggcccctctggagcaagaggcgagagaggtttccctggcgagcgtggtgtgcaaggtccccctggtcctgctggtccccgaggggccaacggtgctcccggcaacgatggtgctaagggtgatgctggtgcccctggagctcccggtagccagggcgcccctggccttcagggaatgcctggtgaacgtggtgcagctggtcttccagggcctaagggtgacagaggtgatgctggtcccaaaggtgctgatggctctcctggcaaagatggcgtccgtggtctgactggccccattggtcctcctggccctgctggtgcccctggtgacaagggtgaaagtggtcccagcggccctgctggtcccactggagctcgtggtgcccccggagaccgtggtgagcctggtccccccggccctgctggctttgctggcccccctggtgctgacggccaacctggtgctaaaggcgaacctggtgatgctggtgctaaaggcgatgctggtccccctggccctgccggacccgctggaccccctggccccattggtaatgttggtgctcctggagccaaaggtgctcgcggcagcgctggtccccctggtgctactggtttccctggtgctgctggccgagtcggtcctcctggcccctctggaaatgctggaccccctggccctcctggtcctgctggcaaagaaggcggcaaaggtccccgtggtgagactggccctgctggacgtcctggtgaagttggtccccctggtccccctggccctgctggcgagaaaggatcccctggtgctgatggtcctgctggtgctcctggtactcccgggcctcaaggtattgctggacagcgtggtgtggtcggcctgcctggtcagagaggagagagaggcttccctggtcttcctggcccctctggtgaacctggcaaacaaggtccctctggagcaagtggtgaacgtggtccccctggtcccatgggcccccctggattggctggaccccctggtgaatctggacgtgagggggctcctggtgccgaaggttcccctggacgagacggttctcctggcgccaagggtgaccgtggtgagaccggccccgctggaccccctggtgctcctggtgctcctggtgcccctggccccgttggccctgctggcaagagtggtgatcgtggtgagactggtcctgctggtcccaccggtcctgtcggccctgttggcgcccgtggccccgccggaccccaaggcccccgtggtgacaagggtgagacaggcgaacagggcgacagaggcataaagggtcaccgtggcttctctggcctccagggtccccctggccctcctggctctcctggtgaacaaggtccctctggagcctctggtcctgctggtccccgaggtccccctggctctgctggtgctcctggcaaagatggactcaacggtctccctggccccattgggccccctggtcctcgcggtcgcactggtgatgctggtcctgttggtccccccggccctcctggacctcctggtccccctggtcctcccagcgctggtttcgacttcagcttcctgccccagccacctcaagagaaggctcacgatggtggccgctactaccgggctgatgatgccaatgtggttcgtgaccgtgacctcgaggtggacaccaccctcaagagcctgagccagcagatcgagaacatccggagcccagagggcagccgcaagaaccccgcccgcacctgccgtgacctcaagatgtgccactctgactggaagagtggagagtactggattgaccccaaccaaggctgcaacctggatgccatcaaagtcttctgcaacatggagactggtgagacctgcgtgtaccccactcagcccagtgtggcccagaagaactggtacatcagcaagaaccccaaggacaagaggcatgtctggttcggcgagagcatgaccgatggattccagttcgagtatggcggccagggctccgaccctgccgatgtggccatccagctgaccttcctgcgcctgatgtccaccgaggcctcccagaacatcacctaccactgcaagaacagcgtggcctacatggaccagcagactggcaacctcaagaaggccctgctcctccagggctccaacgagatcgagatccgcgccgagggcaacagccgcttcacctacagcgtcactgtcgatggctgcacgagtcacaccggagcctggggcaagacagtgattgaatacaaaaccaccaagacctcccgcctgcccatcatcgatgtggcccccttggacgttggtgccccagaccaggaattcggcttcgacgttggccctgtctgcttcctgtaaactccctccatcccaacctggctccctcccacccaaccaactttccccccaacccggaaacagacaagcaacccaaactgaaccccctcaaaagccaaaaaatgggagacaatttcacatggactttggaaaatatttttttcctttgcattcatctctcaaacttagtttttatctttgaccaaccgaacatgaccaaaaaccaaaagtgcattcaaccttaccaaaaaaaaaaaaaaaaaaagaataaataaataactttttaaaaaaggaagcttggtccacttgcttgaagacccatgcgggggtaagtccctttctgcccgttgggcttatgaaaccccaatgctgccctttctgctcctttctccacaccccccttggggcctcccctccactccttcccaaatctgtctccccagaagacacaggaaacaatgtattgtctgcccagcaatcaaaggcaatgctcaaacacccaagtggcccccaccctcagcccgctcctgcccgcccagcacccccaggccctgggggacctggggttctcagactgccaaagaagccttgccatctggcgctcccatggctcttgcaacatctccccttcgtttttgagggggtcatgccgggggagccaccagcccctcactgggttcggaggagagtcaggaagggccacgacaaagcagaaacatcggatttggggaacgcgtgtcaatcccttgtgccgcagggctgggcgggagagactgttctgttccttgtgtaactgtgttgctgaaagactacctcgttcttgtcttgatgtgtcaccggggcaactgcctgggggcggggatgggggcagggtggaagcggctccccattttataccaaaggtgctacatctatgtgatgggtggggtggggagggaatcactggtgctatagaaattgagatgcccccccaggccagcaaatgttcctttttgttcaaagtctatttttattccttgatatttttctttttttttttttttttttgtggatggggacttgtgaatttttctaaaggtgctatttaacatgggaggagagcgtgtgcggctccagcccagcccgctgctcactttccaccctctctccacctgcctctggcttctcaggcctctgctctccgacctctctcctctgaaaccctcctccacagctgcagcccatcctcccggctccctcctagtctgtcctgcgtcctctgtccccgggtttcagagacaacttcccaaagcacaaagcagtttttccccctaggggtgggaggaagcaaaagactctgtacctattttgtatgtgtataataatttgagatgtttttaattattttgattgctggaataaagcatgtggaaatgacccaaacataatcgtcggagcagacgggagtttctcctcggggtcggagcaggaggcacgcggagtgtgaggccacgcatgagcggacgctaaccccctccccagccacaaagagtctacatgtctagggtctagacatgttcagctttgtggacctccggctcctgctcctcttagcggccaccgccctcctgacgcacggccaagaggaaggccaagtcgagggccaagacgaagacatcccaccaatcacctgcgtacagaacggcctcaggtaccatgaccgagacgtgtggaaacccgagccctgccggatctgcgtctgcgacaacggcaaggtgttgtgcgatgacgtgatctgtgacgagaccaagaactgccccggcgccgaagtccccgagggcgagtgctgtcccgtctgccccgacggctcagagtcacccaccgaccaagaaaccaccggcgtcgagggacccaagggagacactggcccccgaggcccaaggggacccgcaggcccccctggccgagatggcatccctggacagcctggacttcccggaccccccggaccccccggacctcccggaccccctggcctcggaggaaactttgctccccagctgtcttatggctatgatgagaaatcaaccggaggaatttccgtgcctggccccatgggtccctctggtcctcgtggtctccctggcccccctggtgcacctggtccccaaggcttccaaggtccccctggtgagcctggcgagcctggagcttcaggtcccatgggtccccgaggtcccccaggtccccctggaaagaatggagatgatggggaagctggaaaacctggtcgtcctggtgagcgtgggcctcctgggcctcagggtgctcgaggattgcccggaacagctggcctccctggaatgaagggacacagaggtttcagtggtttggatggtgccaagggagatgctggtcctgctggtcctaagggtgagcctggcagccctggtgaaaatggagctcctggtcagatgggcccccgtggcctgcctggtgagagaggtcgccctggagcccctggccctgctggtgctcgtggaaatgatggtgctactggtgctgccgggccccctggtcccaccggccccgctggtcctcctggcttccctggtgctgttggtgctaagggtgaagctggtccccaagggccccgaggctctgaaggtccccagggtgtgcgtggtgagcctggcccccctggccctgctggtgctgctggccctgctggaaaccctggtgctgatggacagcctggtgctaaaggtgccaatggtgctcctggtattgctggtgctcctggcttccctggtgcccgaggcccctctggaccccagggccccggcggccctcctggtcccaagggtaacagcggtgaacctggtgctcctggcagcaaaggagacactggtgctaagggagagcctggccctgttggtgttcaaggaccccctggccctgctggagaggaaggaaagcgaggagctcgaggtgaacccggacccactggcctgcccggaccccctggcgagcgtggtggacctggtagccgtggtttccctggcgcagatggtgttgctggtcccaagggtcccgctggtgaacgtggttctcctggccctgctggccccaaaggatctcctggtgaagctggtcgtcccggtgaagctggtctgcctggtgccaagggtctgactggaagccctggcagccctggtcctgatggcaaaactggcccccctggtcccgccggtcaagatggtcgccccggacccccaggcccacctggtgcccgtggtcaggctggtgtgatgggattccctggacctaaaggtgctgctggagagcccggcaaggctggagagcgaggtgttcccggaccccctggcgctgtcggtcctgctggcaaagatggagaggctggagctcagggaccccctggccctgctggtcccgctggcgagagaggtgaacaaggccctgctggctcccccggattccagggtctccctggtcctgctggtcctccaggtgaagcaggcaaacctggtgaacagggtgttcctggagaccttggcgcccctggcccctctggagcaagaggcgagagaggtttccctggcgagcgtggtgtgcaaggtccccctggtcctgctggtccccgaggggccaacggtgctcccggcaacgatggtgctaagggtgatgctggtgcccctggagctcccggtagccagggcgcccctggccttcagg

SEQ ID NO: 826 - DNA, 32765 bp, Homo sapiens
  misc_feature (51)..(51): second gene starts at position 51
atgctgggtggatccggatcgcatggaagacgcagcctggccgcgctctcccaaatcgcctaccagaggaatgacgatgatgaagaggaggcagcccgggaacggcgccgccgagcccgacaggaacggctgcggcagaagcaggaggaagaatccttgggacaggtgaccgaccaggtggaggtgaatgcccagaacagtgtgcctgacgaggaggccaagacaaccaccacaaacactcaagtggaaggggatgatgaggccgcattcctggagcgcctggctcggcgtgaggaaagacgccaaaaacgccttcaggaggctctggagcggcagaaggagttcgacccaacaataacagatgcaagtctgtcgctcccaagcagaagaatgcaaaatgacacagcagaaaatgaaactaccgagaaggaagaaaaaagtgaaagtcgccaagaaagatacgagatagaggaaacagaaacagtcaccaagtcctaccagaagaatgattggagggatgctgaagaaaacaagaaagaagacaaggaaaaggaggaggaggaagaggagaagccaaagcgagggagcattggagaaaatcagggagaagagaagggaactaaagtgcaagctaaaagagaaaagctccaagaagacaagcctaccttcaaaaaagaagagatcaaagatgaaaagattaaaaaggacaaagaacccaaagaagaagttaagagcttcatggatcgaaagaagggatttacagaagttaagtcgcagaatggagaattcatgacccacaaacttaaacatactgagaatactttcagccgccctggagggagggccagcgtggacaccaaggaggctgagggcgccccccaggtggaagccggcaaaaggctggaggagcttcgtcgtcgtcgcggggagaccgagagcgaagagttcgagaagctcaaacagaagcagcaggaggcggctttggagctggaggaactcaagaaaaagagggaggagagaaggaaggtcctggaggaggaagagcagaggctcctgctcctcttagcggccaccgccctcctgacgcacggccaagaggaaggccaagtcgagggccaagacgaagacatcccaccaatcacctgcgtacagaacggcctcaggtaccatgaccgagacgtgtggaaacccgagccctgccggatctgcgtctgcgacaacggcaaggtgttgtgcgatgacgtgatctgtgacgagaccaagaactgccccggcgccgaagtccccgagggcgagtgctgtcccgtctgccccgacggctcagagtcacccaccgaccaagaaaccaccggcgtcgagggacccaagggagacactggcccccgaggcccaaggggacccgcaggcccccctggccgagatggcatccctggacagcctggacttcccggaccccccggaccccccggacctcccggaccccctggcctcggaggaaactttgctccccagctgtcttatggctatgatgagaaatcaaccggaggaatttccgtgcctggccccatgggtccctctggtcctcgtggtctccctggcccccctggtgcacctggtccccaaggcttccaaggtccccctggtgagcctggcgagcctggagcttcaggtcccatgggtccccgaggtcccccaggtccccctggaaagaatggagatgatggggaagctggaaaacctggtcgtcctggtgagcgtgggcctcctgggcctcagggtgctcgaggattgcccggaacagctggcctccctggaatgaagggacacagaggtttcagtggtttggatggtgccaagggagatgctggtcctgctggtcctaagggtgagcctggcagccctggtgaaaatggagctcctggtcagatgggcccccgtggcctgcctggtgagagaggtcgccctggagcccctggccctgctggtgctcgtggaaatgatggtgctactggtgctgccgggccccctggtcccaccggccccgctggtcctcctggcttccctggtgctgttggtgctaagggtgaagctggtccccaagggccccgaggctctgaaggtccccagggtgtgcgtggtgagcctggcccccctggccctgctggtgctgctggccctgctggaaaccctggtgctgatggacagcctggtgctaaaggtgccaatggtgctcctggtattgctggtgctcctggcttccctggtgcccgaggcccctctggaccccagggccccggcggccctcctggtcccaagggtaacagcggtgaacctggtgctcctggcagcaaaggagacactggtgctaagggagagcctggccctgttggtgttcaaggaccccctggccctgctggagaggaaggaaagcgaggagctcgaggtgaacccggacccactggcctgcccggaccccctggcgagcgtggtggacctggtagccgtggtttccctggcgcagatggtgttgctggtcccaagggtcccgctggtgaacgtggttctcctggccctgctggccccaaaggatctcctggtgaagctggtcgtcccggtgaagctggtctgcctggtgccaagggtctgactggaagccctggcagccctggtcctgatggcaaaactggcccccctggtcccgccggtcaagatggtcgccccggacccccaggcccacctggtgcccgtggtcaggctggtgtgatgggattccctggacctaaaggtgctgctggagagcccggcaaggctggagagcgaggtgttcccggaccccctggcgctgtcggtcctgctggcaaagatggagaggctggagctcagggaccccctggccctgctggtcccgctggcgagagaggtgaacaaggccctgctggctcccccggattccagggtctccctggtcctgctggtcctccaggtgaagcaggcaaacctggtgaacagggtgttcctggagaccttggcgcccctggcccctctggagcaagaggcgagagaggtttccctggcgagcgtggtgtgcaaggtccccctggtcctgctggtccccgaggggccaacggtgctcccggcaacgatggtgctaagggtgatgctggtgcccctggagctcccggtagccagggcgcccctggccttcagggaatgcctggtgaacgtggtgcagctggtcttccagggcctaagggtgacagaggtgatgctggtcccaaaggtgctgatggctctcctggcaaagatggcgtccgtggtctgactggccccattggtcctcctggccctgctggtgcccctggtgacaagggtgaaagtggtcccagcggccctgctggtcccactggagctcgtggtgcccccggagaccgtggtgagcctggtccccccggccctgctggctttgctggcccccctggtgctgacggccaacctggtgctaaaggcgaacctggtgatgctggtgctaaaggcgatgctggtccccctggccctgccggacccgctggaccccctggccccattggtaatgttggtgctcctggagccaaaggtgctcgcggcagcgctggtccccctggtgctactggtttccctggtgctgctggccgagtcggtcctcctggcccctctggaaatgctggaccccctggccctcctggtcctgctggcaaagaaggcggcaaaggtccccgtggtgagactggccctgctggacgtcctggtgaagttggtccccctggtccccctggccctgctggcgagaaaggatcccctggtgctgatggtcctgctggtgctcctggtactcccgggcctcaaggtattgctggacagcgtggtgtggtcggcctgcctggtcagagaggagagagaggcttccctggtcttcctggcccctctggtgaacctggcaaacaaggtccctctggagcaagtggtgaacgtggtccccctggtcccatgggcccccctggattggctggaccccctggtgaatctggacgtgagggggctcctggtgccgaaggttcccctggacgagacggttctcctggcgccaagggtgaccgtggtgagaccggccccgctggaccccctggtgctcctggtgctcctggtgcccctggccccgttggccctgctggcaagagtggtgatcgtggtgagactggtcctgctggtcccaccggtcctgtcggccctgttggcgcccgtggccccgccggaccccaaggcccccgtggtgacaagggtgagacaggcgaacagggcgacagaggcataaagggtcaccgtggcttctctggcctccagggtccccctggccctcctggctctcctggtgaacaaggtccctctggagcctctggtcctgctggtccccgaggtccccctggctctgctggtgctcctggcaaagatggactcaacggtctccctggccccattgggccccctggtcctcgcggtcgcactggtgatgctggtcctgttggtccccccggccctcctggacctcctggtccccctggtcctcccagcgctggtttcgacttcagcttcctgccccagccacctcaagagaaggctcacgatggtggccgctactaccgggctgatgatgccaatgtggttcgtgaccgtgacctcgaggtggacaccaccctcaagagcctgagccagcagatcgagaacatccggagcccagagggcagccgcaagaaccccgcccgcacctgccgtgacctcaagatgtgccactctgactggaagagtggagagtactggattgaccccaaccaaggctgcaacctggatgccatcaaagtcttctgcaacatggagactggtgagacctgcgtgtaccccactcagcccagtgtggcccagaagaactggtacatcagcaagaaccccaaggacaagaggcatgtctggttcggcgagagcatgaccgatggattccagttcgagtatggcggccagggctccgaccctgccgatgtggccatccagctgaccttcctgcgcctgatgtccaccgaggcctcccagaacatcacctaccactgcaagaacagcgtggcctacatggaccagcagactggcaacctcaagaaggccctgctcctccagggctccaacgagatcgagatccgcgccgagggcaacagccgcttcacctacagcgtcactgtcgatggctgcacgagtcacaccggagcctggggcaagacagtgattgaatacaaaaccaccaagacctcccgcctgcccatcatcgatgtggcccccttggacgttggtgccccagaccaggaattcggcttcgacgttggccctgtctgcttcctgtaaactccctccatcccaacctggctccctcccacccaaccaactttccccccaacccggaaacagacaagcaacccaaactgaaccccctcaaaagccaaaaaatgggagacaatttcacatggactttggaaaatatttttttcctttgcattcatctctcaaacttagtttttatctttgaccaaccgaacatgaccaaaaaccaaaagtgcattcaaccttaccaaaaaaaaaaaaaaaaaaagaataaataaataactttttaaaaaaggaagcttggtccacttgcttgaagacccatgcgggggtaagtccctttctgcccgttgggcttatgaaaccccaatgctgccctttctgctcctttctccacaccccccttggggcctcccctccactccttcccaaatctgtctccccagaagacacaggaaacaatgtattgtctgcccagcaatcaaaggcaatgctcaaacacccaagtggcccccaccctcagcccgctcctgcccgcccagcacccccaggccctgggggacctggggttctcagactgccaaagaagccttgccatctggcgctcccatggctcttgcaacatctccccttcgtttttgagggggtcatgccgggggagccaccagcccctcactgggttcggaggagagtcaggaagggccacgacaaagcagaaacatcggatttggggaacgcgtgtcaatcccttgtgccgcagggctgggcgggagagactgttctgttccttgtgtaactgtgttgctgaaagactacctcgttcttgtcttgatgtgtcaccggggcaactgcctgggggcggggatgggggcagggtggaagcggctccccattttataccaaaggtgctacatctatgtgatgggtggggtggggagggaatcactggtgctatagaaattgagatgcccccccaggccagcaaatgttcctttttgttcaaagtctatttttattccttgatatttttctttttttttttttttttttgtggatggggacttgtgaatttttctaaaggtgctatttaacatgggaggagagcgtgtgcggctccagcccagcccgctgctcactttccaccctctctccacctgcctctggcttctcaggcctctgctctccgacctctctcctctgaaaccctcctccacagctgcagcccatcctcccggctccctcctagtctgtcctgcgtcctctgtccccgggtttcagagacaacttcccaaagcacaaagcagtttttccccctaggggtgggaggaagcaaaagactctgtacctattttgtatgtgtataataatttgagatgtttttaattattttgattgctggaataaagcatgtggaaatgacccaaacataatcgtcggagcagacgggagtttctcctcggggtcggagcaggaggcacgcggagtgtgaggccacgcatgagcggacgctaaccccctccccagccacaaagagtctacatgtctagggtctagacatgttcagctttgtggacctccggctcctgctcctcttagcggccaccgccctcctgacgcacggccaagaggaaggccaagtcgagggccaagacgaagacatcccaccaatcacctgcgtacagaacggcctcaggtaccatgaccgagacgtgtggaaacccgagccctgccggatctgcgtctgcgacaacggcaaggtgttgtgcgatgacgtgatctgtgacgagaccaagaactgccccggcgccgaagtccccgagggcgagtgctgtcccgtctgccccgacggctcagagtcacccaccgaccaagaaaccaccggcgtcgagggacccaagggagacactggcccccgaggcccaaggggacccgcaggcccccctggccgagatggcatccctggacagcctggacttcccggaccccccggaccccccggacctcccggaccccctggcctcggaggaaactttgctccccagctgtcttatggctatgatgagaaatcaaccggaggaatttccgtgcctggccccatgggtccctctggtcctcgtggtctccctggcccccctggtgcacctggtccccaaggcttccaaggtccccctggtgagcctggcgagcctggagcttcaggtcccatgggtccccgaggtcccccaggtccccctggaaagaatggagatgatggggaagctggaaaacctggtcgtcctggtgagcgtgggcctcctgggcctcagggtgctcgaggattgcccggaacagctggcctccctggaatgaagggacacagaggtttcagtggtttggatggtgccaagggagatgctggtcctgctggtcctaagggtgagcctggcagccctggtgaaaatggagctcctggtcagatgggcccccgtggcctgcctggtgagagaggtcgccctggagcccctggccctgctggtgctcgtggaaatgatggtgctactggtgctgccgggccccctggtcccaccggccccgctggtcctcctggcttccctggtgctgttggtgctaagggtgaagctggtccccaagggccccgaggctctgaaggtccccagggtgtgcgtggtgagcctggcccccctggccctgctggtgctgctggccctgctggaaaccctggtgctgatggacagcctggtgctaaaggtgccaatggtgctcctggtattgctggtgctcctggcttccctggtgcccgaggcccctctggaccccagggccccggcggccctcctggtcccaagggtaacagcggtgaacctggtgctcctggcagcaaaggagacactggtgctaagggagagcctggccctgttggtgttcaaggaccccctggccctgctggagaggaaggaaagcgaggagctcgaggtgaacccggacccactggcctgcccggaccccctggcgagcgtggtggacctggtagccgtggtttccctggcgcagatggtgttgctggtcccaagggtcccgctggtgaacgtggttctcctggccctgctggccccaaaggatctcctggtgaagctggtcgtcccggtgaagctggtctgcctggtgccaagggtctgactggaagccctggcagccctggtcctgatggcaaaactggcccccctggtcccgccggtcaagatggtcgccccggacccccaggcccacctggtgcccgtggtcaggctggtgtgatgggattccctggacctaaaggtgctgctggagagcccggcaaggctggagagcgaggtgttcccggaccccctggcgctgtcggtcctgctggcaaagatggagaggctggagctcagggaccccctggccctgctggtcccgctggcgagagaggtgaacaaggccctgctggctcccccggattccagggtctccctggtcctgctggtcctccaggtgaagcaggcaaacctggtgaacagggtgttcctggagaccttggcgcccctggcccctctggagcaagaggcgagagaggtttccctggcgagcgtggtgtgcaaggtccccctggtcctgctggtccccgaggggccaacggtgctcccggcaacgatggtgctaagggtgatgctggtgcccctggagctcccggtagccagggcgcccctggccttcagggaatgcctggtgaacgtggtgcagctggtcttccagggcctaagggtgacagaggtgatgctggtcccaaaggtgctgatggctctcctggcaaagatggcgtccgtggtctgactggccccattggtcctcctggccctgctggtgcccctggtgacaagggtgaaagtggtcccagcggccctgctggtcccactggagctcgtggtgcccccggagaccgtggtgagcctggtccccccggccctgctggctttgctggcccccctggtgctgacggccaacctggtgctaaaggcgaacctggtgatgctggtgctaaaggcgatgctggtccccctggccctgccggacccgctggaccccctggccccattggtaatgttggtgctcctggagccaaaggtgctcgcggcagcgctggtccccctggtgctactggtttccctggtgctgctggccgagtcggtcctcctggcccctctggaaatgctggaccccctggccctcctggtcctgctggcaaagaaggcggcaaaggtccccgtggtgagactggccctgctggacgtcctggtgaagttggtccccctggtccccctggccctgctggcgagaaaggatcccctggtgctgatggtcctgctggtgctcctggtactcccgggcctcaaggtattgctggacagcgtggtgtggtcggcctgcctggtcagagaggagagagaggcttccctggtcttcctggcccctctggtgaacctggcaaacaaggtccctctggagcaagtggtgaacgtggtccccctggtcccatgggcccccctggattggctggaccccctggtgaatctggacgtgagggggctcctggtgccgaaggttcccctggacgagacggttctcctggcgccaagggtgaccgtggtgagaccggccccgctggaccccctggtgctcctggtgctcctggtgcccctggccccgttggccctgctggcaagagtggtgatcgtggtgagactggtcctgctggtcccaccggtcctgtcggccctgttggcgcccgtggccccgccggaccccaaggcccccgtggtgacaagggtgagacaggcgaacagggcgacagaggcataaagggtcaccgtggcttctctggcctccagggtccccctggccctcctggctctcctggtgaacaaggtccctctggagcctctggtcctgctggtccccgaggtccccctggctctgctggtgctcctggcaaagatggactcaacggtctccctggccccattgggccccctggtcctcgcggtcgcactggtgatgctggtcctgttggtccccccggccctcctggacctcctggtccccctggtcctcccagcgctggtttcgacttcagcttcctgccccagccacctcaagagaaggctcacgatggtggccgctactaccgggctgatgatgccaatgtggttcgtgaccgtgacctcgaggtggacaccaccctcaagagcctgagccagcagatcgagaacatccggagcccagagggcagccgcaagaaccccgcccgcacctgccgtgacctcaagatgtgccactctgactggaagagtggagagtactggattgaccccaaccaaggctgcaacctggatgccatcaaagtcttctgcaacatggagactggtgagacctgcgtgtaccccactcagcccagtgtggcccagaagaactggtacatcagcaagaaccccaaggacaagaggcatgtctggttcggcgagagcatgaccgatggattccagttcgagtatggcggccagggctccgaccctgccgatgtggccatccagctgaccttcctgcgcctgatgtccaccgaggcctcccagaacatcacctaccactgcaagaacagcgtggcctacatggaccagcagactggcaacctcaagaaggccctgctcctccagggctccaacgagatcgagatccgcgccgagggcaacagccgcttcacctacagcgtcactgtcgatggctgcacgagtcacaccggagcctggggcaagacagtgattgaatacaaaaccaccaagacctcccgcctgcccatcatcgatgtggcccccttggacgttggtgccccagaccaggaattcggcttcgacgttggccctgtctgcttcctgtaaactccctccatcccaacctggctccctcccacccaaccaactttccccccaacccggaaacagacaagcaacccaaactgaaccccctcaaaagccaaaaaatgggagacaatttcacatggactttggaaaatatttttttcctttgcattcatctctcaaacttagtttttatctttgaccaaccgaacatgaccaaaaaccaaaagtgcattcaaccttaccaaaaaaaaaaaaaaaaaaagaataaataaataactttttaaaaaaggaagcttggtccacttgcttgaagacccatgcgggggtaagtccctttctgcccgttgggcttatgaaaccccaatgctgccctttctgctcctttctccacaccccccttggggcctcccctccactccttcccaaatctgtctccccagaagacacaggaaacaatgtattgtctgcccagcaatcaaaggcaatgctcaaacacccaagtggcccccaccctcagcccgctcctgcccgcccagcacccccaggccctgggggacctggggttctcagactgccaaagaagccttgccatctggcgctcccatggctcttgcaacatctccccttcgtttttgagggggtcatgccgggggagccaccagcccctcactgggttcggaggagagtcaggaagggccacgacaaagcagaaacatcggatttggggaacgcgtgtcaatcccttgtgccgcagggctgggcgggagagactgttctgttccttgtgtaactgtgttgctgaaagactacctcgttcttgtcttgatgtgtcaccggggcaactgcctgggggcggggatgggggcagggtggaagcggctccccattttataccaaaggtgctacatctatgtgatgggtggggtggggagggaatcactggtgctatagaaattgagatgcccccccaggccagcaaatgttcctttttgttcaaagtctatttttattccttgatatttttctttttttttttttttttttgtggatggggacttgtgaatttttctaaaggtgctatttaacatgggaggagagcgtgtgcggctccagcccagcccgctgctcactttccaccctctctccacctgcctctggcttctcaggcctctgctctccgacctctctcctctgaaaccctcctccacagctgcagcccatcctcccggctccctcctagtctgtcctgcgtcctctgtccccgggtttcagagacaacttcccaaagcacaaagcagtttttccccctaggggtgggaggaagcaaaagactctgtacctattttgtatgtgtataataatttgagatgtttttaattattttgattgctggaataaagcatgtggaaatgacccaaacataatcgtcggagcagacgggagtttctcctcggggtcggagcaggaggcacgcggagtgtgaggccacgcatgagcggacgctaaccccctccccagccacaaagagtctacatgtctagggtctagacatgttcagctttgtggacctccggctcctgctcctcttagcggccaccgccctcctgacgcacggccaagaggaaggccaagtcgagggccaagacgaagacatcccaccaatcacctgcgtacagaacggcctcaggtaccatgaccgagacgtgtggaaacccgagccctgccggatctgcgtctgcgacaacggcaaggtgttgtgcgatgacgtgatctgtgacgagaccaagaactgccccggcgccgaagtccccgagggcgagtgctgtcccgtctgccccgacggctcagagtcacccaccgaccaagaaaccaccggcgtcgagggacccaagggagacactggcccccgaggcccaaggggacccgcaggcccccctggccgagatggcatccctggacagcctggacttcccggaccccccggaccccccggacctcccggaccccctggcctcggaggaaactttgctccccagctgtcttatggctatgatgagaaatcaaccggaggaatttccgtgcctggccccatgggtccctctggtcctcgtggtctccctggcccccctggtgcacctggtccccaaggcttccaaggtccccctggtgagcctggcgagcctggagcttcaggtcccatgggtccccgaggtcccccaggtccccctggaaagaatggagatgatggggaagctggaaaacctggtcgtcctggtgagcgtgggcctcctgggcctcagggtgctcgaggattgcccggaacagctggcctccctggaatgaagggacacagaggtttcagtggtttggatggtgccaagggagatgctggtcctgctggtcctaagggtgagcctggcagccctggtgaaaatggagctcctggtcagatgggcccccgtggcctgcctggtgagagaggtcgccctggagcccctggccctgctggtgctcgtggaaatgatggtgctactggtgctgccgggccccctggtcccaccggccccgctggtcctcctggcttccctggtgctgttggtgctaagggtgaagctggtccccaagggccccgaggctctgaaggtccccagggtgtgcgtggtgagcctggcccccctggccctgctggtgctgctggccctgctggaaaccctggtgctgatggacagcctggtgctaaaggtgccaatggtgctcctggtattgctggtgctcctggcttccctggtgcccgaggcccctctggaccccagggccccggcggccctcctggtcccaagggtaacagcggtgaacctggtgctcctggcagcaaaggagacactggtgctaagggagagcctggccctgttggtgttcaaggaccccctggccctgctggagaggaaggaaagcgaggagctcgaggtgaacccggacccactggcctgcccggaccccctggcgagcgtggtggacctggtagccgtggtttccctggcgcagatggtgttgctggtcccaagggtcccgctggtgaacgtggttctcctggccctgctggccccaaaggatctcctggtgaagctggtcgtcccggtgaagctggtctgcctggtgccaagggtctgactggaagccctggcagccctggtcctgatggcaaaactggcccccctggtcccgccggtcaagatggtcgccccggacccccaggcccacctggtgcccgtggtcaggctggtgtgatgggattccctggacctaaaggtgctgctggagagcccggcaaggctggagagcgaggtgttcccggaccccctggcgctgtcggtcctgctggcaaagatggagaggctggagctcagggaccccctggccctgctggtcccgctggcgagagaggtgaacaaggccctgctggctcccccggattccagggtctccctggtcctgctggtcctccaggtgaagcaggcaaacctggtgaacagggtgttcctggagaccttggcgcccctggcccctctggagcaagaggcgagagaggtttccctggcgagcgtggtgtgcaaggtccccctggtcctgctggtccccgaggggccaacggtgctcccggcaacgatggtgctaagggtgatgctggtgcccctggagctcccggtagccagggcgcccctggccttcagggaatgcctggtgaacgtggtgcagctggtcttccagggcctaagggtgacagaggtgatgctggtcccaaaggtgctgatggctctcctggcaaagatggcgtccgtggtctgactggccccattggtcctcctggccctgctggtgcccctggtgacaagggtgaaagtggtcccagcggccctgctggtcccactggagctcgtggtgcccccggagaccgtggtgagcctggtccccccggccctgctggctttgctggcccccctggtgctgacggccaacctggtgctaaaggcgaacctggtgatgctggtgctaaaggcgatgctggtccccctggccctgccggacccgctggaccccctggccccattggtaatgttggtgctcctggagccaaaggtgctcgcggcagcgctggtccccctggtgctactggtttccctggtgctgctggccgagtcggtcctcctggcccctctggaaatgctggaccccctggccctcctggtcctgctggcaaagaaggcggcaaaggtccccgtggtgagactggccctgctggacgtcctggtgaagttggtccccctggtccccctggccctgctggcgagaaaggatcccctggtgctgatggtcctgctggtgctcctggtactcccgggcctcaaggtattgctggacagcgtggtgtggtcggcctgcctggtcagagaggagagagaggcttccctggtcttcctggcccctctggtgaacctggcaaacaaggtccctctggagcaagtggtgaacgtggtccccctggtcccatgggcccccctggattggctggaccccctggtgaatctggacgtgagggggctcctggtgccgaaggttcccctggacgagacggttctcctggcgccaagggtgaccgtggtgagaccggccccgctggaccccctggtgctcctggtgctcctggtgcccctggccccgttggccctgctggcaagagtggtgatcgtggtgagactggtcctgctggtcccaccggtcctgtcggccctgttggcgcccgtggccccgccggaccccaaggcccccgtggtgacaagggtgagacaggcgaacagggcgacagaggcataaagggtcaccgtggcttctctggcctccagggtccccctggccctcctggctctcctggtgaacaaggtccctctggagcctctggtcctgctggtccccgaggtccccctggctctgctggtgctcctggcaaagatggactcaacggtctccctggccccattgggccccctggtcctcgcggtcgcactggtgatgctggtcctgttggtccccccggccctcctggacctcctggtccccctggtcctcccagcgctggtttcgacttcagcttcctgccccagccacctcaagagaaggctcacgatggtggccgctactaccgggctgatgatgccaatgtggttcgtgaccgtgacctcgaggtggacaccaccctcaagagcctgagccagcagatcgagaacatccggagcccagagggcagccgcaagaaccccgcccgcacctgccgtgacctcaagatgtgccactctgactggaagagtggagagtactggattgaccccaaccaaggctgcaacctggatgccatcaaagtcttctgcaacatggagactggtgagacctgcgtgtaccccactcagcccagtgtggcccagaagaactggtacatcagcaagaaccccaaggacaagaggcatgtctggttcggcgagagcatgaccgatggattccagttcgagtatggcggccagggctccgaccctgccgatgtggccatccagctgaccttcctgcgcctgatgtccaccgaggcctcccagaacatcacctaccactgcaagaacagcgtggcctacatggaccagcagactggcaacctcaagaaggccctgctcctccagggctccaacgagatcgagatccgcgccgagggcaacagccgcttcacctacagcgtcactgtcgatggctgcacgagtcacaccggagcctggggcaagacagtgattgaatacaaaaccaccaagacctcccgcctgcccatcatcgatgtggcccccttggacgttggtgccccagaccaggaattcggcttcgacgttggccctgtctgcttcctgtaaactccctccatcccaacctggctccctcccacccaaccaactttccccccaacccggaaacagacaagcaacccaaactgaaccccctcaaaagccaaaaaatgggagacaatttcacatggactttggaaaatatttttttcctttgcattcatctctcaaacttagtttttatctttgaccaaccgaacatgaccaaaaaccaaaagtgcattcaaccttaccaaaaaaaaaaaaaaaaaaagaataaataaataactttttaaaaaaggaagcttggtccacttgcttgaagacccatgcgggggtaagtccctttctgcccgttgggcttatgaaaccccaatgctgccctttctgctcctttctccacaccccccttggggcctcccctccactccttcccaaatctgtctccccagaagacacaggaaacaatgtattgtctgcccagcaatcaaaggcaatgctcaaacacccaagtggcccccaccctcagcccgctcctgcccgcccagcacccccaggccctgggggacctggggttctcagactgccaaagaagccttgccatctggcgctcccatggctcttgcaacatctccccttcgtttttgagggggtcatgccgggggagccaccagcccctcactgggttcggaggagagtcaggaagggccacgacaaagcagaaacatcggatttggggaacgcgtgtcaatcccttgtgccgcagggctgggcgggagagactgttctgttccttgtgtaactgtgttgctgaaagactacctcgttcttgtcttgatgtgtcaccggggcaactgcctgggggcggggatgggggcagggtggaagcggctccccattttataccaaaggtgctacatctatgtgatgggtggggtggggagggaatcactggtgctatagaaattgagatgcccccccaggccagcaaatgttcctttttgttcaaagtctatttttattccttgatatttttctttttttttttttttttttgtggatggggacttgtgaatttttctaaaggtgctatttaacatgggaggagagcgtgtgcggctccagcccagcccgctgctcactttccaccctctctccacctgcctctggcttctcaggcctctgctctccgacctctctcctctgaaaccctcctccacagctgcagcccatcctcccggctccctcctagtctgtcctgcgtcctctgtccccgggtttcagagacaacttcccaaagcacaaagcagtttttccccctaggggtgggaggaagcaaaagactctgtacctattttgtatgtgtataataatttgagatgtttttaattattttgattgctggaataaagcatgtggaaatgacccaaacataatcgtcggagcagacgggagtttctcctcggggtcggagcaggaggcacgcggagtgtgaggccacgcatgagcggacgctaaccccctccccagccacaaagagtctacatgtctagggtctagacatgttcagctttgtggacctccggctcctgctcctcttagcggccaccgccctcctgacgcacggccaagaggaaggccaagtcgagggccaagacgaagacatcccaccaatcacctgcgtacagaacggcctcaggtaccatgaccgagacgtgtggaaacccgagccctgccggatctgcgtctgcgacaacggcaaggtgttgtgcgatgacgtgatctgtgacgagaccaagaactgccccggcgccgaagtccccgagggcgagtgctgtcccgtctgccccgacggctcagagtcacccaccgaccaagaaaccaccggcgtcgagggacccaagggagacactggcccccgaggcccaaggggacccgcaggcccccctggccgagatggcatccctggacagcctggacttcccggaccccccggaccccccggacctcccggaccccctggcctcggaggaaactttgctccccagctgtcttatggctatgatgagaaatcaaccggaggaatttccgtgcctggccccatgggtccctctggtcctcgtggtctccctggcccccctggtgcacctggtccccaaggcttccaaggtccccctggtgagcctggcgagcctggagcttcaggtcccatgggtccccgaggtcccccaggtccccctggaaagaatggagatgatggggaagctggaaaacctggtcgtcctggtgagcgtgggcctcctgggcctcagggtgctcgaggattgcccggaacagctggcctccctggaatgaagggacacagaggtttcagtggtttggatggtgccaagggagatgctggtcctgctggtcctaagggtgagcctggcagccctggtgaaaatggagctcctggtcagatgggcccccgtggcctgcctggtgagagaggtcgccctggagcccctggccctgctggtgctcgtggaaatgatggtgctactggtgctgccgggccccctggtcccaccggccccgctggtcctcctggcttccctggtgctgttggtgctaagggtgaagctggtccccaagggccccgaggctctgaaggtccccagggtgtgcgtggtgagcctggcccccctggccctgctggtgctgctggccctgctggaaaccctggtgctgatggacagcctggtgctaaaggtgccaatggtgctcctggtattgctggtgctcctggcttccctggtgcccgaggcccctctggaccccagggccccggcggccctcctggtcccaagggtaacagcggtgaacctggtgctcctggcagcaaaggagacactggtgctaagggagagcctggccctgttggtgttcaaggaccccctggccctgctggagaggaaggaaagcgaggagctcgaggtgaacccggacccactggcctgcccggaccccctggcgagcgtggtggacctggtagccgtggtttccctggcgcagatggtgttgctggtcccaagggtcccgctggtgaacgtggttctcctggccctgctggccccaaaggatctcctggtgaagctggtcgtcccggtgaagctggtctgcctggtgccaagggtctgactggaagccctggcagccctggtcctgatggcaaaactggcccccctggtcccgccggtcaagatggtcgccccggacccccaggcccacctggtgcccgtggtcaggctggtgtgatgggattccctggacctaaaggtgctgctggagagcccggcaaggctggagagcgaggtgttcccggaccccctggcgctgtcggtcctgctggcaaagatggagaggctggagctcagggaccccctggccctgctggtcccgctggcgagagaggtgaacaaggccctgctggctcccccggattccagggtctccctggtcctgctggtcctccaggtgaagcaggcaaacctggtgaacagggtgttcctggagaccttggcgcccctggcccctctggagcaagaggcgagagaggtttccctggcgagcgtggtgtgcaaggtccccctggtcctgctggtccccgaggggccaacggtgctcccggcaacgatggtgctaagggtgatgctggtgcccctggagctcccggtagccagggcgcccctggccttcagggaatgcctggtgaacgtggtgcagctggtcttccagggcctaagggtgacagaggtgatgctggtcccaaaggtgctgatggctctcctggcaaagatggcgtccgtggtctgactggccccattggtcctcctggccctgctggtgcccctggtgacaagggtgaaagtggtcccagcggccctgctggtcccactggagctcgtggtgcccccggagaccgtggtgagcctggtccccccggccctgctggctttgctggcccccctggtgctgacggccaacctggtgctaaaggcgaacctggtgatgctggtgctaaaggcgatgctggtccccctggccctgccggacccgctggaccccctggccccattggtaatgttggtgctcctggagccaaaggtgctcgcggcagcgctggtccccctggtgctactggtttccctggtgctgctggccgagtcggtcctcctggcccctctggaaatgctggaccccctggccctcctggtcctgctggcaaagaaggcggcaaaggtccccgtggtgagactggccctgctggacgtcctggtgaagttggtccccctggtccccctggccctgctggcgagaaaggatcccctggtgctgatggtcctgctggtgctcctggtactcccgggcctcaaggtattgctggacagcgtggtgtggtcggcctgcctggtcagagaggagagagaggcttccctggtcttcctggcccctctggtgaacctggcaaacaaggtccctctggagcaagtggtgaacgtggtccccctggtcccatgggcccccctggattggctggaccccctggtgaatctggacgtgagggggctcctggtgccgaaggttcccctggacgagacggttctcctggcgccaagggtgaccgtggtgagaccggccccgctggaccccctggtgctcctggtgctcctggtgcccctggccccgttggccctgctggcaagagtggtgatcgtggtgagactggtcctgctggtcccaccggtcctgtcggccctgttggcgcccgtggccccgccggaccccaaggcccccgtggtgacaagggtgagacaggcgaacagggcgacagaggcataaagggtcaccgtggcttctctggcctccagggtccccctggccctcctggctctcctggtgaacaaggtccctctggagcctctggtcctgctggtccccgaggtccccctggctctgctggtgctcctggcaaagatggactcaacggtctccctggccccattgggccccctggtcctcgcggtcgcactggtgatgctggtcctgttggtccccccggccctcctggacctcctggtccccctggtcctcccagcgctggtttcgacttcagcttcctgccccagccacctcaagagaaggctcacgatggtggccgctactaccgggctgatgatgccaatgtggttcgtgaccgtgacctcgaggtggacaccaccctcaagagcctgagccagcagatcgagaacatccggagcccagagggcagccgcaagaaccccgcccgcacctgccgtgacctcaagatgtgccactctgactggaagagtggagagtactggattgaccccaaccaaggctgcaacctggatgccatcaaagtcttctgcaacatggagactggtgagacctgcgtgtaccccactcagcccagtgtggcccagaagaactggtacatcagcaagaaccccaaggacaagaggcatgtctggttcggcgagagcatgaccgatggattccagttcgagtatggcggccagggctccgaccctgccgatgtggccatccagctgaccttcctgcgcctgatgtccaccgaggcctcccagaacatcacctaccactgcaagaacagcgtggcctacatggaccagcagactggcaacctcaagaaggccctgctcctccagggctccaacgagatcgagatccgcgccgagggcaacagccgcttcacctacagcgtcactgtcgatggctgcacgagtcacaccggagcctggggcaagacagtgattgaatacaaaaccaccaagacctcccgcctgcccatcatcgatgtggcccccttggacgttggtgccccagaccaggaattcggcttcgacgttggccctgtctgcttcctgtaaactccctccatcccaacctggctccctcccacccaaccaactttccccccaacccggaaacagacaagcaacccaaactgaaccccctcaaaagccaaaaaatgggagacaatttcacatggactttggaaaatatttttttcctttgcattcatctctcaaacttagtttttatctttgaccaaccgaacatgaccaaaaaccaaaagtgcattcaaccttaccaaaaaaaaaaaaaaaaaaagaataaataaataactttttaaaaaaggaagcttggtccacttgcttgaagacccatgcgggggtaagtccctttctgcccgttgggcttatgaaaccccaatgctgccctttctgctcctttctccacaccccccttggggcctcccctccactccttcccaaatctgtctccccagaagacacaggaaacaatgtattgtctgcccagcaatcaaaggcaatgctcaaacacccaagtggcccccaccctcagcccgctcctgcccgcccagcacccccaggccctgggggacctggggttctcagactgccaaagaagccttgccatctggcgctcccatggctcttgcaacatctccccttcgtttttgagggggtcatgccgggggagccaccagcccctcactgggttcggaggagagtcaggaagggccacgacaaagcagaaacatcggatttggggaacgcgtgtcaatcccttgtgccgcagggctgggcgggagagactgttctgttccttgtgtaactgtgttgctgaaagactacctcgttcttgtcttgatgtgtcaccggggcaactgcctgggggcggggatgggggcagggtggaagcggctccccattttataccaaaggtgctacatctatgtgatgggtggggtggggagggaatcactggtgctatagaaattgagatgcccccccaggccagcaaatgttcctttttgttcaaagtctatttttattccttgatatttttctttttttttttttttttttgtggatggggacttgtgaatttttctaaaggtgctatttaacatgggaggagagcgtgtgcggctccagcccagcccgctgctcactttccaccctctctccacctgcctctggcttctcaggcctctgctctccgacctctctcctctgaaaccctcctccacagctgcagcccatcctcccggctccctcctagtctgtcctgcgtcctctgtccccgggtttcagagacaacttcccaaagcacaaagcagtttttccccctaggggtgggaggaagcaaaagactctgtacctattttgtatgtgtataataatttgagatgtttttaattattttgattgctggaataaagcatgtggaaatgacccaaacataatcgtcggagcagacgggagtttctcctcggggtcggagcaggaggcacgcggagtgtgaggccacgcatgagcggacgctaaccccctccccagccacaaagagtctacatgtctagggtctagacatgttcagctttgtggacctccggctcctgctcctcttagcggccaccgccctcctgacgcacggccaagaggaaggccaagtcgagggccaagacgaagacatcccaccaatcacctgcgtacagaacggcctcaggtaccatgaccgagacgtgtggaaacccgagccctgccggatctgcgtctgcgacaacggcaaggtgttgtgcgatgacgtgatctgtgacgagaccaagaactgccccggcgccgaagtccccgagggcgagtgctgtcccgtctgccccgacggctcagagtcacccaccgaccaagaaaccaccggcgtcgagggacccaagggagacactggcccccgaggcccaaggggacccgcaggcccccctggccgagatggcatccctggacagcctggacttcccggaccccccggaccccccggacctcccggaccccctggcctcggaggaaactttgctccccagctgtcttatggctatgatgagaaatcaaccggaggaatttccgtgcctggccccatgggtccctctggtcctcgtggtctccctggcccccctggtgcacctggtccccaaggcttccaaggtccccctggtgagcctggcgagcctggagcttcaggtcccatgggtccccgaggtcccccaggtccccctggaaagaatggagatgatggggaagctggaaaacctggtcgtcctggtgagcgtgggcctcctgggcctcagggtgctcgaggattgcccggaacagctggcctccctggaatgaagggacacagaggtttcagtggtttggatggtgccaagggagatgctggtcctgctggtcctaagggtgagcctggcagccctggtgaaaatggagctcctggtcagatgggcccccgtggcctgcctggtgagagaggtcgccctggagcccctggccctgctggtgctcgtggaaatgatggtgctactggtgctgccgggccccctggtcccaccggccccgctggtcctcctggcttccctggtgctgttggtgctaagggtgaagctggtccccaagggccccgaggctctgaaggtccccagggtgtgcgtggtgagcctggcccccctggccctgctggtgctgctggccctgctggaaaccctggtgctgatggacagcctggtgctaaaggtgccaatggtgctcctggtattgctggtgctcctggcttccctggtgcccgaggcccctctggaccccagggccccggcggccctcctggtcccaagggtaacagcggtgaacctggtgctcctggcagcaaaggagacactggtgctaagggagagcctggccctgttggtgttcaaggaccccctggccctgctggagaggaaggaaagcgaggagctcgaggtgaacccggacccactggcctgcccggaccccctggcgagcgtggtggacctggtagccgtggtttccctggcgcagatggtgttgctggtcccaagggtcccgctggtgaacgtggttctcctggccctgctggccccaaaggatctcctggtgaagctggtcgtcccggtgaagctggtctgcctggtgccaagggtctgactggaagccctggcagccctggtcctgatggcaaaactggcccccctggtcccgccggtcaagatggtcgccccggacccccaggcccacctggtgcccgtggtcaggctggtgtgatgggattccctggacctaaaggtgctgctggagagcccggcaaggctggagagcgaggtgttcccggaccccctggcgctgtcggtcctgctggcaaagatggagaggctggagctcagggaccccctggccctgctggtcccgctggcgagagaggtgaacaaggccctgctggctcccccggattccagggtctccctggtcctgctggtcctccaggtgaagcaggcaaacctggtgaacagggtgttcctggagaccttggcgcccctggcccctctggagcaagaggcgagagaggtttccctggcgagcgtggtgtgcaaggtccccctggtcctgctggtccccgaggggccaacggtgctcccggcaacgatggtgctaagggtgatgctggtgcccctggagctcccggtagccagggcgcccctggccttcagggaatgcctggtgaacgtggtgcagctggtcttccagggcctaagggtgacagaggtgatgctggtcccaaaggtgctgatggctctcctggcaaagatggcgtccgtggtctgactggccccattggtcctcctggccctgctggtgcccctggtgacaagggtgaaagtggtcccagcggccctgctggtcccactggagctcgtggtgcccccggagaccgtggtgagcctggtccccccggccctgctggctttgctggcccccctggtgctgacggccaacctggtgctaaaggcgaacctggtgatgctggtgctaaaggcgatgctggtccccctggccctgccggacccgctggaccccctggccccattggtaatgttggtgctcctggagccaaaggtgctcgcggcagcgctggtccccctggtgctactggtttccctggtgctgctggccgagtcggtcctcctggcccctctggaaatgctggaccccctggccctcctggtcctgctggcaaagaaggcggcaaaggtccccgtggtgagactggccctgctggacgtcctggtgaagttggtccccctggtccccctggccctgctggcgagaaaggatcccctggtgctgatggtcctgctggtgctcctggtactcccgggcctcaaggtattgctggacagcgtggtgtggtcggcctgcctggtcagagaggagagagaggcttccctggtcttcctggcccctctggtgaacctggcaaacaaggtccctctggagcaagtggtgaacgtggtccccctggtcccatgggcccccctggattggctggaccccctggtgaatctggacgtgagggggctcctggtgccgaaggttcccctggacgagacggttctcctggcgccaagggtgaccgtggtgagaccggccccgctggaccccctggtgctcctggtgctcctggtgcccctggccccgttggccctgctggcaagagtggtgatcgtggtgagactggtcctgctggtcccaccggtcctgtcggccctgttggcgcccgtggccccgccggaccccaaggcccccgtggtgacaagggtgagacaggcgaacagggcgacagaggcataaagggtcaccgtggcttctctggcctccagggtccccctggccctcctggctctcctggtgaacaaggtccctctggagcctctggtcctgctggtccccgaggtccccctggctctgctggtgctcctggcaaagatggactcaacggtctccctggccccattgggccccctggtcctcgcggtcgcactggtgatgctggtcctgttggtccccccggccctcctggacctcctggtccccctggtcctcccagcgctggtttcgacttcagcttcctgccccagccacctcaagagaaggctcacgatggtggccgctactaccgggctgatgatgccaatgtggttcgtgaccgtgacctcgaggtggacaccaccctcaagagcctgagccagcagatcgagaacatccggagcccagagggcagccgcaagaaccccgcccgcacctgccgtgacctcaagatgtgccactctgactggaagagtggagagtactggattgaccccaaccaaggctgcaacctggatgccatcaaagtcttctgcaacatggagactggtgagacctgcgtgtaccccactcagcccagtgtggcccagaagaactggtacatcagcaagaaccccaaggacaagaggcatgtctggttcggcgagagcatgaccgatggattccagttcgagtatggcggccagggctccgaccctgccgatgtggccatccagctgaccttcctgcgcctgatgtccaccgaggcctcccagaacatcacctaccactgcaagaacagcgtggcctacatggaccagcagactggcaacctcaagaaggccctgctcctccagggctccaacgagatcgagatccgcgccgagggcaacagccgcttcacctacagcgtcactgtcgatggctgcacgagtcacaccggagcctggggcaagacagtgattgaatacaaaaccaccaagacctcccgcctgcccatcatcgatgtggcccccttggacgttggtgccccagaccaggaattcggcttcgacgttggccctgtctgcttcctgtaaactccctccatcccaacctggctccctcccacccaaccaactttccccccaacccggaaacagacaagcaacccaaactgaaccccctcaaaagccaaaaaatgggagacaatttcacatggactttggaaaatatttttttcctttgcattcatctctcaaacttagtttttatctttgaccaaccgaacatgaccaaaaaccaaaagtgcattcaaccttaccaaaaaaaaaaaaaaaaaaagaataaataaataactttttaaaaaaggaagcttggtccacttgcttgaagacccatgcgggggtaagtccctttctgcccgttgggcttatgaaaccccaatgctgccctttctgctcctttctccacaccccccttggggcctcccctccactccttcccaaatctgtctccccagaagacacaggaaacaatgtattgtctgcccagcaatcaaaggcaatgctcaaacacccaagtggcccccaccctcagcccgctcctgcccgcccagcacccccaggccctgggggacctggggttctcagactgccaaagaagccttgccatctggcgctcccatggctcttgcaacatctccccttcgtttttgagggggtcatgccgggggagccaccagcccctcactgggttcggaggagagtcaggaagggccacgacaaagcagaaacatcggatttggggaacgcgtgtcaatcccttgtgccgcagggctgggcgggagagactgttctgttccttgtgtaactgtgttgctgaaagactacctcgttcttgtcttgatgtgtcaccggggcaactgcctgggggcggggatgggggcagggtggaagcggctccccattttataccaaaggtgctacatctatgtgatgggtggggtggggagggaatcactggtgctatagaaattgagatgcccccccaggccagcaaatgttcctttttgttcaaagtctatttttattccttgatatttttctttttttttttttttttttgtggatggggacttgtgaatttttctaaaggtgctatttaacatgggaggagagcgtgtgcggctccagcccagcccgctgctcactttccaccctctctccacctgcctctggcttctcaggcctctgctctccgacctctctcctctgaaaccctcctccacagctgcagcccatcctcccggctccctcctagtctgtcctgcgtcctctgtccccgggtttcagagacaacttcccaaagcacaaagcagtttttccccctaggggtgggaggaagcaaaagactctgtacctattttgtatgtgtataataatttgagatgtttttaattattttgattgctggaataaagcatgtggaaatgacccaaacataatcgtcggagcagacgggagtttctcctcggggtcggagcaggaggcacgcggagtgtgaggccacgcatgagcggacgctaaccccctccccagccacaaagagtctacatgtctagggtctagacatgttcagctttgtggacctccggctcctgctcctcttagcggccaccgccctcctgacgcacggccaagaggaaggccaagtcgagggccaagacgaagacatcccaccaatcacctgcgtacagaacggcctcaggtaccatgaccgagacgtgtggaaacccgagccctgccggatctgcgtctgcgacaacggcaaggtgttgtgcgatgacgtgatctgtgacgagaccaagaactgccccggcgccgaagtccccgagggcgagtgctgtcccgtctgccccgacggctcagagtcacccaccgaccaagaaaccaccggcgtcgagggacccaagggagacactggcccccgaggcccaaggggacccgcaggcccccctggccgagatggcatccctggacagcctggacttcccggaccccccggaccccccggacctcccggaccccctggcctcggaggaaactttgctccccagctgtcttatggctatgatgagaaatcaaccggaggaatttccgtgcctggccccatgggtccctctggtcctcgtggtctccctggcccccctggtgcacctggtccccaaggcttccaaggtccccctggtgagcctggcgagcctggagcttcaggtcccatgggtccccgaggtcccccaggtccccctggaaagaatggagatgatggggaagctggaaaacctggtcgtcctggtgagcgtgggcctcctgggcctcagggtgctcgaggattgcccggaacagctggcctccctggaatgaagggacacagaggtttcagtggtttggatggtgccaagggagatgctggtcctgctggtcctaagggtgagcctggcagccctggtgaaaatggagctcctggtcagatgggcccccgtggcctgcctggtgagagaggtcgccctggagcccctggccctgctggtgctcgtggaaatgatggtgctactggtgctgccgggccccctggtcccaccggccccgctggtcctcctggcttccctggtgctgttggtgctaagggtgaagctggtccccaagggccccgaggctctgaaggtccccagggtgtgcgtggtgagcctggcccccctggccctgctggtgctgctggccctgctggaaaccctggtgctgatggacagcctggtgctaaaggtgccaatggtgctcctggtattgctggtgctcctggcttccctggtgcccgaggcccctctggaccccagggccccggcggccctcctggtcccaagggtaacagcggtgaacctggtgctcctggcagcaaaggagacactggtgctaagggagagcctggccctgttggtgttcaaggaccccctggccctgctggagaggaaggaaagcgaggagctcgaggtgaacccggacccactggcctgcccggaccccctggcgagcgtggtggacctggtagccgtggtttccctggcgcagatggtgttgctggtcccaagggtcccgctggtgaacgtggttctcctggccctgctggccccaaaggatctcctggtgaagctggtcgtcccggtgaagctggtctgcctggtgccaagggtctgactggaagccctggcagccctggtcctgatggcaaaactggcccccctggtcccgccggtcaagatggtcgccccggacccccaggcccacctggtgcccgtggtcaggctggtgtgatgggattccctggacctaaaggtgctgctggagagcccggcaaggctggagagcgaggtgttcccggaccccctggcgctgtcggtcctgctggcaaagatggagaggctggagctcagggaccccctggccctgctggtcccgctggcgagagaggtgaacaaggccctgctggctcccccggattccagggtctccctggtcctgctggtcctccaggtgaagcaggcaaacctggtgaacagggtgttcctggagaccttggcgcccctggcccctctggagcaagaggcgagagaggtttccctggcgagcgtggtgtgcaaggtccccctggtcctgctggtccccgaggggccaacggtg

SEQ ID NO: 827 - DNA, 10062 bp, Homo sapiens
  misc_feature (552)..(552): second gene starts at position 552
atggcacagcaagctgccgataagtatctctatgtggataaaaacttcatcaacaatccgctggcccaggccgactgggctgccaagaagctggtatgggtgccttccgacaagagtggctttgagccagccagcctcaaggaggaggtgggcgaagaggccatcgtggagctggtggagaatgggaagaaggtgaaggtgaacaaggatgacatccagaagatgaacccgcccaagttctccaaggtggaggacatggcagagctcacgtgcctcaacgaagcctcggtgctgcacaacctcaaggagcgttactactcagggctcatctacacctattcaggcctgttctgtgtggtcatcaatccttacaagaacctgcccatctactctgaagagattgtggaaatgtacaagggcaagaagaggcacgagatgccccctcacatctatgccatcacagacaccgcctacaggagtatgatgcaagaccgagaagatcaatccatcttgtgcactggtgaatctggagctggcaagacggagaacaccaagaaggtcatccagtatctggcgtacgtggcgtcctcgcacaagagcaagaaggaccagggcgagctggagcggcagctgctgcaggccaaccccatcctggaggccttcgggaacgccaagaccgtgaagaatgacaactcctcccgcttcggcaaattcattcgcatcaactttgatgtcaatggctacattgttggagccaacattgagacttatcttttggagaaatctcgtgctatccgccaagccaaggaagaacggaccttccacatcttctattatctcctgtctggggctggagagcacctgaagaccgatctcctgttggagccgtacaacaaataccgcttcctgtccaatggacacgtcaccatccccgggcagcaggacaaggacatgttccaggagaccatggaggccatgaggattatgggcatcccagaagaggagcaaatgggcctgctgcgggtcatctcaggggttcttcagctcggcaacatcgtcttcaagaaggagcggaacactgaccaggcgtccatgcccgacaacacagctgcccaaaaggtgtcccatctcttgggtatcaatgtgaccgatttcaccagaggaatcctcaccccgcgcatcaaggtgggacgggattacgtccagaaggcgcagactaaagagcaggctgactttgccatcgaggccttggccaaggcgacctatgagcggatgttccgctggctggtgctgcgcatcaacaaggctctggacaagaccaagaggcagggcgcctccttcatcgggatcctggacattgccggcttcgagatctttgatctgaactcgtttgagcagctgtgcatcaattacaccaatgagaagctgcagcagctcttcaaccacaccatgttcatcctggagcaggaggagtaccagcgcgagggcatcgagtggaacttcatcgactttggcctcgacctgcagccctgcatcgacctcattgagaagccagcaggccccccgggcattctggccctgctggacgaggagtgctggttccccaaagccaccgacaagagcttcgtggagaaggtgatgcaggagcagggcacccaccccaagttccagaagcccaagcagctgaaggacaaagctgatttctgcattatccactatgccggcaaggtggattacaaagctgacgagtggctgatgaagaacatggatcccctgaatgacaacatcgccacactgctccaccagtcctctgacaagtttgtctcggagctgtggaaggatgtggaccgcatcatcggcctggaccaggtggccggcatgtcggagaccgcactgcccggggccttcaagacgcggaagggcatgttccgcactgtggggcagctttacaaggagcagctggccaagctgatggctacgctgaggaacacgaaccccaactttgtccgctgcatcatccccaaccacgagaagaaggccggcaagctggacccgcatctcgtgctggaccagctgcgctgcaacggtgttctcgagggcatccgtatctgccgccagggcttccccaacagggtggtcttccaggagtttcggcagagatatgagatcctgactccaaactccattcccaagggtttcatggacgggaagcaggcgtgcgtgctcatgataaaagccctggagctcgacagcaatctgtaccgcattggccagagcaaagtcttcttccgtgccggtgtgctggcccacctggaggaggagcgagacctgaagatcaccgacgtcatcatagggttccaggcctgctgcaggggctacctggccaggaaagcatttgccaagcggcagcagcagcttaccgccatgaaggtcctccagcggaactgcgctgcctacctgaagctgcggaactggcagtggtggcggctcttcaccaaggtcaagccgctgctgcaggtgagccggcaggaggaggagatgatggccaaggaggaggagctggtgaaggtcagagagaagcagctggctgcggagaacaggctcacggagatggagacgctgcagtctcagctcatggcagagaaattgcagctgcaggagcagctccaggcagaaaccgagctgtgtgccgaggctgaggagctccgggcccgcctgaccgccaagaagcaggaattagaagagatctgccatgacctagaggccagggtggaggaggaggaggagcgctgccagcacctgcaggcggagaagaagaagatgcagcagaacatccaggagcttgaggagcagctggaggaggaggagagcgcccggcagaagctgcagctggagaaggtgaccaccgaggcgaagctgaaaaagctggaggaggagcagatcatcctggaggaccagaactgcaagctggccaaggaaaagaaactgctggaagacagaatagctgagttcaccaccaacctcacagaagaggaggagaaatctaagagcctcgccaagctcaagaacaagcatgaggcaatgatcactgacttggaagagcgcctccgcagggaggagaagcagcgacaggagctggagaagacccgccggaagctggagggagactccacagacctcagcgaccagatcgccgagctccaggcccagatcgcggagctcaagatgcagctggccaagaaagaggaggagctccaggccgccctggccagagtggaagaggaagctgcccagaagaacatggccctcaagaagatccgggagctggaatctcagatctctgaactccaggaagacctggagtctgagcgtgcttccaggaataaagctgagaagcagaaacgggaccttggggaagagctagaggctctgaaaacagagttggaggacacgctggattccacagctgcccagcaggagctcaggtcaaaacgtgagcaggaggtgaacatcctgaagaagaccctggaggaggaggccaagacccacgaggcccagatccaggagatgaggcagaagcactcacaggccgtggaggagctggcggagcagctggagcagacgaagcgggtgaaagcaaacctcgagaaggcaaagcagactctggagaacgagcggggggagctggccaacgaggtgaaggtgctgctgcagggcaaaggggactcggagcacaagcgcaagaaagtggaggcgcagctgcaggagctgcaggtcaagttcaacgagggagagcgcgtgcgcacagagctggccgacaaggtcaccaagctgcaggtggagctggacaacgtgaccgggcttctcagccagtccgacagcaagtccagcaagctcaccaaggacttctccgcgctggagtcccagctgcaggacactcaggagctgctgcaggaggagaaccggcagaagctgagcctgagcaccaagctcaagcaggtggaggacgagaagaattccttccgggagcagctggaggaggaggaggaggccaagcacaacctggagaagcagatcgccaccctccatgcccaggtggccgacatgaaaaagaagatggaggacagtgtggggtgcctggaaactgctgaggaggtgaagaggaagctccagaaggacctggagggcctgagccagcggcacgaggagaaggtggccgcctacgacaagctggagaagaccaagacgcggctgcagcaggagctggacgacctgctggtggacctggaccaccagcgccagagcgcgtgcaacctggagaagaagcagaagaagtttgaccagctcctggcggaggagaagaccatctctgccaagtatgcagaggagcgcgaccgggctgaggcggaggcccgagagaaggagaccaaggctctgtcgctggcccgggccctggaggaagccatggagcagaaggcggagctggagcggctcaacaagcagttccgcacggagatggaggaccttatgagctccaaggatgatgtgggcaagagtgtccacgagctggagaagtccaagcgggccctagagcagcaggtggaggagatgaagacgcagctggaagagctggaggacgagctgcaggccaccgaagatgccaagctgcggttggaggtcaacctgcaggccatgaaggcccagttcgagcgggacctgcagggccgggacgagcagagcgaggagaagaagaagcagctggtcagacaggtgcgggagatggaggcagagctggaggacgagaggaagcagcgctcgatggcagtggccgcccggaagaagctggagatggacctgaaggacctggaggcgcacatcgactcggccaacaagaaccgggacgaagccatcaaacagctgcggaagctgcaggcccagatgaaggactgcatgcgcgagctggatgacacccgcgcctctcgtgaggagatcctggcccaggccaaagagaacgagaagaagctgaagagcatggaggccgagatgatccagttgcaggaggaactggcagccgcggagcgtgccaagcgccaggcccagcaggagcgggatgagctggctgacgagatcgccaacagcagcggcaaaggagccctggcgttagaggagaagcggcgtctggaggcccgcatcgcccagctggaggaggagctggaggaggagcagggcaacacggagctgatcaacgaccggctgaagaaggccaacctgcagatcgaccagatcaacaccgacctgaacctggagcgcagccacgcccagaagaacgagaatgctcggcagcagctggaacgccagaacaaggagcttaaggtcaagctgcaggagatggagggcactgtcaagtccaagtacaaggcctccatcaccgccctcgaggccaagattgcacagctggaggagcagctggacaacgagaccaaggagcgccaggcagcctgcaaacaggtgcgtcggaccgagaagaagctgaaggatgtgctgctgcaggcagcacatccaccaccatcaggagccacagcagcagccgccggggtttcagtgccaactcagccaggctccctggggtcagccgctctggcttcagcagcatctccgtgtcccgctccaggggcagtggtggcctgggtggcgcatgtggaggagctggctttggcagccgcagtctgtatggcctggggggctccaagaggatctccattggagggggcagctgtgccatcagtggcggctatggcagcagagccggaggcagctatggctttggtggcgccgggagtggatttggtttcggtggtggagccggcattggctttggtctgggtggtggagccggccttgctggtggctttgggggccctggcttccctgtgtgcccccctggaggcatccaagaggtcactgtcaaccagagtctcctgactcccctcaacctgcaaattgaccccgccatccagcgggtgcgggccgaggagcgtgagcagatcaagaccctcaacaacaagtttgcctccttcatcgacaaggtgcggttcctagagcagcagaacaaggttctggacaccaagtggaccctgctgcaggagcagggcaccaagactgtgaggcagaacctggagccgttgttcgagcagtacatcaacaacctcaggaggcagctggacaacatcgtgggggaacggggtcgtctggactcggagctgagaaacatgcaggacctggtggaggacctcaagaacaaatatgaggatgaaatcaacaagcgcacagcagcagagaatgaatttgtgactctgaagaaggatgtggatgctgcctacatgaacaaggttgaactgcaagccaaggcagacactcttacagatgagatcaacttcctgagagccttgtatgatgcagagctgtcccagatgcagacccacatctcagacacatccgtggtgctatccatggacaacaaccgcaacctggacctggacagcatcatcgctgaggtcaaggcccaatatgaggagattgctcagaggagcagggctgaggctgagtcctggtaccagacaaagtacgaggagctgcagatcacagcaggcagacatggggacgacctgcgcaacaccaagcaggagattgctgagatcaaccgcatgatccagaggctgagatctgagatcgaccacgtcaagaagcagtgtgccaacctacaggccgccattgctgatgctgagcagcgtggggagatggccctcaaggatgctaagaacaagctggaagggctggaggatgccctgcagaaggccaagcaggacctggcccggctgctgaaggagtaccaggagctgatgaacgtcaagctggccctggatgtggagatcgccacctaccgcaagctgctggagggcgaggagtgcaggctgaatggcgaaggcgttggacaagtcaacatctctgtagtgcagtccaccgtctccagtggctatggcggtgccagcggtgtcggcagtggcttaggcctgggtggaggaagcagctactcctatggcagtggtcttggcgttggaggcggctttagttccagcagcggcagagccactgggggtggcctcagctctgttggaggcggcagttccaccatcaagtacaccaccacctcctcctccagcaggaagagctacaagcactgaagtgctgccgccagctctcagtcccacagctctcaggcccctctctggcagcagagccctctcctcaggttgcttgtcctcccctggcctccagtctcccctgccctcccgggtagagctgggatgccctcacttttcttctcatcaatacctgttccactgagctcctgttgcttaccatcaagtcaacagttatcagcactcagacatgcgaatgtcctttttagttcccgtattattacaggtatctgagtctgccataattctgagaagaaaatgacctatatccccataagaactgaaactcagtctaggtccagctgcagatgaggagtcctctctttaattgctaaccatcctgcccattatagctacactcaggagttctcatctgacaagtcagttgtcctgatcttctcttgcagtgtccctgaatggcaagtgatgtaccttctgatgcagtctgcattcctgcactgctttctctgctctctttgccttcttttgttctgttgaataaagcatattgagaatgtgaacgcctccagcctctcacactctcctaagccctctcatctcctggaaccatggccagcacatccaccaccatcaggagccacagcagcagccgccggggtttcagtgccaactcagccaggctccctggggtcagccgctctggcttcagcagcatctccgtgtcccgctccaggggcagtggtggcctgggtggcgcatgtggaggagctggctttggcagccgcagtctgtatggcctggggggctccaagaggatctccattggagggggcagctgtgccatcagtggcggctatggcagcagagccggaggcagctatggctttggtggcgccgggagtggatttggtttcggtggtggagccggcattggctttggtctgggtggtggagccggccttgctggtggctttgggggccctggcttccctgtgtgcccccctggaggcatccaagaggtcactgtcaaccagagtctcctgactcccctcaacctgcaaattgaccccgccatccagcgggtgcgggccgaggagcgtgagcagatcaagaccctcaacaacaagtttgcctccttcatcgacaaggtgcggttcctagagcagcagaacaaggttctggacaccaagtggaccctgctgcaggagcagggcaccaagactgtgaggcagaacctggagccgttgttcgagcagtacatcaacaacctcaggaggcagctggacaacatcgtgggggaacggggtcgtctggactcggagctgagaaacatgcaggacctggtggaggacctcaagaacaaatatgaggatgaaatcaacaagcgcacagcagcagagaatgaatttgtgactctgaagaaggatgtggatgctgcctacatgaacaaggttgaactgcaagccaaggcagacactcttacagatgagatcaacttcctgagagccttgtatgatgcagagctgtcccagatgcagacccacatctcagacacatccgtggtgctatccatggacaacaaccgcaacctggacctggacagcatcatcgctgaggtcaaggcccaatatgaggagattgctcagaggagcagggctgaggctgagtcctggtaccagacaaagtacgaggagctgcagatcacagcaggcagacatggggacgacctgcgcaacaccaagcaggagattgctgagatcaaccgcatgatccagaggctgagatctgagatcgaccacgtcaagaagcagtgtgccaacctacaggccgccattgctgatgctgagcagcgtggggagatggccctcaaggatgctaagaacaagctggaagggctggaggatgccctgcagaaggccaagcaggacctggcccggctgctgaaggagtaccaggagctgatgaacgtcaagctggccctggatgtggagatcgccacctaccgcaagctgctggagggcgaggagtgcaggctgaatggcgaaggcgttggacaagtcaacatctctgtagtgcagtccaccgtctccagtggctatggcggtgccagcggtgtcggcagtggcttaggcctgggtggaggaagcagctactcctatggcagtggtcttggcgttggaggcggctttagttccagcagcggcagagccactgggggtggcctcagctctgttggaggcggcagttccaccatcaagtacaccaccacctcctcctccagcaggaagagctacaagcactgaagtgctgccgccagctctcagtcccacagctctcaggcccctctctggcagcagagccctctcctcaggttgcttgtcctcccctggcctccagtctcccctgccctcccgggtagagctgggatgccctcacttttcttctcatcaatacctgttccactgagctcctgttgcttaccatcaagtcaacagttatcagcactcagacatgcgaatgtcctttttagttcccgtattattacaggtatctgagtctgccataattctgagaagaaaatgacctatatccccataagaactgaaactcagtctaggtccagctgcagatgaggagtcctctctttaattgctaaccatcctgcccattatagctacactcaggagttctcatctgacaagtcagttgtcctgatcttctcttgcagtgtccctgaatggcaagtgatgtaccttctgatgcagtctgcattcctgcactgctttctctgctctctttgccttcttttgttctgttgaataaagcatattgagaatgtgaa

SEQ ID NO: 828 - DNA, 32765 bp, Homo sapiens
  misc_feature (500)..(500): second gene starts at position 500
atggtgcagcaaaccaacaatgccgagaacacggaagcgctgctggccggcgagagctcggactcgggcgccggcctcgagctgggaatcgcctcctcccccacgcccggctccaccgcctccacgggcggcaaggccgacgacccgagctggtgcaagaccccgagtgggcacatcaagcgacccatgaacgccttcatggtgtggtcgcagatcgagcggcgcaagatcatggagcagtcgcccgacatgcacaacgccgagatctccaagcggctgggcaaacgctggaagctgctcaaagacagcgacaagatccctttcattcgagaggcggagcggctgcgcctcaagcacatggctgactaccccgactacaagtaccggcccaggaagaaggtgaagtccggcaacgccaactccagctcctcggccgccgcctcctccaagccgggggagaagggagacaaggtcggtggcagtggcgggggcggccatggtggtggtggcttcggcagggtcagccttgcgggtgcttgtggagtgggtggctatggcagccggagcctctacaacctggggggctccaagaggatatccatcagcactagtggtggcagcttcaggaaccggtttggtgctggtgctggaggcggctatggctttggaggtggtgccggtagtggatttggtttcggcggtggagctggtggtggctttgggctcggtggcggagctggctttggaggtggcttcggtggccctggctttcctgtctgccctcctggaggtatccaagaggtcactgtcaaccagagtctcctgactcccctcaacctgcaaatcgaccccagcatccagagggtgaggaccgaggagcgcgagcagatcaagaccctcaacaataagtttgcctccttcatcgacaaggtgcggttcctggagcagcagaacaaggttctggacaccaagtggaccctgctgcaggagcagggcaccaagactgtgaggcagaacctggagccgttgttcgagcagtacatcaacaacctcaggaggcagctggacagcatcgtgggggaacggggccgcctggactcagagctgagaaacatgcaggacctggtggaagacttcaagaacaagtatgaggatgaaatcaacaagcgtaccactgctgagaatgagtttgtgatgctgaagaaggatgtagatgctgcctacatgaacaaggtggagctggaggccaaggttgatgcactgatggatgagattaacttcatgaagatgttctttgatgcggagctgtcccagatgcagacgcatgtctctgacacctcagtggtcctctccatggacaacaaccgcaacctggacctggatagcatcatcgctgaggtcaaggcccagtatgaggagattgccaaccgcagccggacagaagccgagtcctggtatcagaccaagtatgaggagctgcagcagacagctggccggcatggcgatgacctccgcaacaccaagcatgagatctctgagatgaaccggatgatccagaggctgagagccgagattgacaatgtcaagaaacagtgcgccaatctgcagaacgccattgcggatgccgagcagcgtggggagctggccctcaaggatgccaggaacaagctggccgagctggaggaggccctgcagaaggccaagcaggacatggcccggctgctgcgtgagtaccaggagctcatgaacaccaagctggccctggacgtggagatcgccacttaccgcaagctgctggagggcgaggaatgcagactcagtggagaaggagttggaccagtcaacatctctgttgtcacaagcagtgtttcctctggatatggcagtggcagtggctatggcggtggcctcggtggaggtcttggcggcggcctcggtggaggtcttgccggaggtagcagtggaagctactactccagcagcagtgggggtgtcggcctaggtggtgggctcagtgtggggggctctggcttcagtgcaagcagtggccgagggctgggggtgggctttggcagtggcgggggtagcagctccagcgtcaaatttgtctccaccacctcctcctcccggaagagcttcaagagctaagaacctgctgcaagtcactgccttccaagtgcagcaacccagcccatggagattgcctcttctaggcagttgctcaagccatgttttatccttttctggagagtagtctagaccaagccaattgcagaaccacattctttggttcccaggagagccccattcccagcccctggtctcccgtgccgcagttctatattctgcttcaaatcagccttcaggtttcccacagcatggcccctgctgacacgagaacccaaagttttcccaaatctaaatcatcaaaacagaatccccaccccaatcccaaattttgttttggttctaactacctccagaatgtgttcaataaaatgcttttataatataatcgacagctctctcgcccagcccagttctggaagggataaaaagggggcatcaccgttcctgggtaacagagccaccttctgcgtcctgctgagctctgttctctccagcacctcccaacccactagtgcctggttctcttgctccaccaggaacaagccaccatgtctcgccagtcaagtgtgtccttccggagcgggggcagtcgtagcttcagcaccgcctctgccatcaccccgtctgtctcccgcaccagcttcacctccgtgtcccggtccgggggtggcggtggtggtggcttcggcagggtcagccttgcgggtgcttgtggagtgggtggctatggcagccggagcctctacaacctggggggctccaagaggatatccatcagcactagtggtggcagcttcaggaaccggtttggtgctggtgctggaggcggctatggctttggaggtggtgccggtagtggatttggtttcggcggtggagctggtggtggctttgggctcggtggcggagctggctttggaggtggcttcggtggccctggctttcctgtctgccctcctggaggtatccaagaggtcactgtcaaccagagtctcctgactcccctcaacctgcaaatcgaccccagcatccagagggtgaggaccgaggagcgcgagcagatcaagaccctcaacaataagtttgcctccttcatcgacaaggtgcggttcctggagcagcagaacaaggttctggacaccaagtggaccctgctgcaggagcagggcaccaagactgtgaggcagaacctggagccgttgttcgagcagtacatcaacaacctcaggaggcagctggacagcatcgtgggggaacggggccgcctggactcagagctgagaaacatgcaggacctggtggaagacttcaagaacaagtatgaggatgaaatcaacaagcgtaccactgctgagaatgagtttgtgatgctgaagaaggatgtagatgctgcctacatgaacaaggtggagctggaggccaaggttgatgcactgatggatgagattaacttcatgaagatgttctttgatgcggagctgtcccagatgcagacgcatgtctctgacacctcagtggtcctctccatggacaacaaccgcaacctggacctggatagcatcatcgctgaggtcaaggcccagtatgaggagattgccaaccgcagccggacagaagccgagtcctggtatcagaccaagtatgaggagctgcagcagacagctggccggcatggcgatgacctccgcaacaccaagcatgagatctctgagatgaaccggatgatccagaggctgagagccgagattgacaatgtcaagaaacagtgcgccaatctgcagaacgccattgcggatgccgagcagcgtggggagctggccctcaaggatgccaggaacaagctggccgagctggaggaggccctgcagaaggccaagcaggacatggcccggctgctgcgtgagtaccaggagctcatgaacaccaagctggccctggacgtggagatcgccacttaccgcaagctgctggagggcgaggaatgcagactcagtggagaaggagttggaccagtcaacatctctgttgtcacaagcagtgtttcctctggatatggcagtggcagtggctatggcggtggcctcggtggaggtcttggcggcggcctcggtggaggtcttgccggaggtagcagtggaagctactactccagcagcagtgggggtgtcggcctaggtggtgggctcagtgtggggggctctggcttcagtgcaagcagtggccgagggctgggggtgggctttggcagtggcgggggtagcagctccagcgtcaaatttgtctccaccacctcctcctcccggaagagcttcaagagctaagaacctgctgcaagtcactgccttccaagtgcagcaacccagcccatggagattgcctcttctaggcagttgctcaagccatgttttatccttttctggagagtagtctagaccaagccaattgcagaaccacattctttggttcccaggagagccccattcccagcccctggtctcccgtgccgcagttctatattctgcttcaaatcagccttcaggtttcccacagcatggcccctgctgacacgagaacccaaagttttcccaaatctaaatcatcaaaacagaatccccaccccaatcccaaattttgttttggttctaactacctccagaatgtgttcaataaaatgcttttataatataatcgacagctctctcgcccagcccagttctggaagggataaaaagggggcatcaccgttcctgggtaacagagccaccttctgcgtcctgctgagctctgttctctccagcacctcccaacccactagtgcctggttctcttgctccaccaggaacaagccaccatgtctcgccagtcaagtgtgtccttccggagcgggggcagtcgtagcttcagcaccgcctctgccatcaccccgtctgtctcccgcaccagcttcacctccgtgtcccggtccgggggtggcggtggtggtggcttcggcagggtcagccttgcgggtgcttgtggagtgggtggctatggcagccggagcctctacaacctggggggctccaagaggatatccatcagcactagtggtggcagcttcaggaaccggtttggtgctggtgctggaggcggctatggctttggaggtggtgccggtagtggatttggtttcggcggtggagctggtggtggctttgggctcggtggcggagctggctttggaggtggcttcggtggccctggctttcctgtctgccctcctggaggtatccaagaggtcactgtcaaccagagtctcctgactcccctcaacctgcaaatcgaccccagcatccagagggtgaggaccgaggagcgcgagcagatcaagaccctcaacaataagtttgcctccttcatcgacaaggtgcggttcctggagcagcagaacaaggttctggacaccaagtggaccctgctgcaggagcagggcaccaagactgtgaggcagaacctggagccgttgttcgagcagtacatcaacaacctcaggaggcagctggacagcatcgtgggggaacggggccgcctggactcagagctgagaaacatgcaggacctggtggaagacttcaagaacaagtatgaggatgaaatcaacaagcgtaccactgctgagaatgagtttgtgatgctgaagaaggatgtagatgctgcctacatgaacaaggtggagctggaggccaaggttgatgcactgatggatgagattaacttcatgaagatgttctttgatgcggagctgtcccagatgcagacgcatgtctctgacacctcagtggtcctctccatggacaacaaccgcaacctggacctggatagcatcatcgctgaggtcaaggcccagtatgaggagattgccaaccgcagccggacagaagccgagtcctggtatcagaccaagtatgaggagctgcagcagacagctggccggcatggcgatgacctccgcaacaccaagcatgagatctctgagatgaaccggatgatccagaggctgagagccgagattgacaatgtcaagaaacagtgcgccaatctgcagaacgccattgcggatgccgagcagcgtggggagctggccctcaaggatgccaggaacaagctggccgagctggaggaggccctgcagaaggccaagcaggacatggcccggctgctgcgtgagtaccaggagctcatgaacaccaagctggccctggacgtggagatcgccacttaccgcaagctgctggagggcgaggaatgcagactcagtggagaaggagttggaccagtcaacatctctgttgtcacaagcagtgtttcctctggatatggcagtggcagtggctatggcggtggcctcggtggaggtcttggcggcggcctcggtggaggtcttgccggaggtagcagtggaagctactactccagcagcagtgggggtgtcggcctaggtggtgggctcagtgtggggggctctggcttcagtgcaagcagtggccgagggctgggggtgggctttggcagtggcgggggtagcagctccagcgtcaaatttgtctccaccacctcctcctcccggaagagcttcaagagctaagaacctgctgcaagtcactgccttccaagtgcagcaacccagcccatggagattgcctcttctaggcagttgctcaagccatgttttatccttttctggagagtagtctagaccaagccaattgcagaaccacattctttggttcccaggagagccccattcccagcccctggtctcccgtgccgcagttctatattctgcttcaaatcagccttcaggtttcccacagcatggcccctgctgacacgagaacccaaagttttcccaaatctaaatcatcaaaacagaatccccaccccaatcccaaattttgttttggttctaactacctccagaatgtgttcaataaaatgcttttataatataatcgacagctctctcgcccagcccagttctggaagggataaaaagggggcatcaccgttcctgggtaacagagccaccttctgcgtcctgctgagctctgttctctccagcacctcccaacccactagtgcctggttctcttgctccaccaggaacaagccaccatgtctcgccagtcaagtgtgtccttccggagcgggggcagtcgtagcttcagcaccgcctctgccatcaccccgtctgtctcccgcaccagcttcacctccgtgtcccggtccgggggtggcggtggtggtggcttcggcagggtcagccttgcgggtgcttgtggagtgggtggctatggcagccggagcctctacaacctggggggctccaagaggatatccatcagcactagtggtggcagcttcaggaaccggtttggtgctggtgctggaggcggctatggctttggaggtggtgccggtagtggatttggtttcggcggtggagctggtggtggctttgggctcggtggcggagctggctttggaggtggcttcggtggccctggctttcctgtctgccctcctggaggtatccaagaggtcactgtcaaccagagtctcctgactcccctcaacctgcaaatcgaccccagcatccagagggtgaggaccgaggagcgcgagcagatcaagaccctcaacaataagtttgcctccttcatcgacaaggtgcggttcctggagcagcagaacaaggttctggacaccaagtggaccctgctgcaggagcagggcaccaagactgtgaggcagaacctggagccgttgttcgagcagtacatcaacaacctcaggaggcagctggacagcatcgtgggggaacggggccgcctggactcagagctgagaaacatgcaggacctggtggaagacttcaagaacaagtatgaggatgaaatcaacaagcgtaccactgctgagaatgagtttgtgatgctgaagaaggatgtagatgctgcctacatgaacaaggtggagctggaggccaaggttgatgcactgatggatgagattaacttcatgaagatgttctttgatgcggagctgtcccagatgcagacgcatgtctctgacacctcagtggtcctctccatggacaacaaccgcaacctggacctggatagcatcatcgctgaggtcaaggcccagtatgaggagattgccaaccgcagccggacagaagccgagtcctggtatcagaccaagtatgaggagctgcagcagacagctggccggcatggcgatgacctccgcaacaccaagcatgagatctctgagatgaaccggatgatccagaggctgagagccgagattgacaatgtcaagaaacagtgcgccaatctgcagaacgccattgcggatgccgagcagcgtggggagctggccctcaaggatgccaggaacaagctggccgagctggaggaggccctgcagaaggccaagcaggacatggcccggctgctgcgtgagtaccaggagctcatgaacaccaagctggccctggacgtggagatcgccacttaccgcaagctgctggagggcgaggaatgcagactcagtggagaaggagttggaccagtcaacatctctgttgtcacaagcagtgtttcctctggatatggcagtggcagtggctatggcggtggcctcggtggaggtcttggcggcggcctcggtggaggtcttgccggaggtagcagtggaagctactactccagcagcagtgggggtgtcggcctaggtggtgggctcagtgtggggggctctggcttcagtgcaagcagtggccgagggctgggggtgggctttggcagtggcgggggtagcagctccagcgtcaaatttgtctccaccacctcctcctcccggaagagcttcaagagctaagaacctgctgcaagtcactgccttccaagtgcagcaacccagcccatggagattgcctcttctaggcagttgctcaagccatgttttatccttttctggagagtagtctagaccaagccaattgcagaaccacattctttggttcccaggagagccccattcccagcccctggtctcccgtgccgcagttctatattctgcttcaaatcagccttcaggtttcccacagcatggcccctgctgacacgagaacccaaagttttcccaaatctaaatcatcaaaacagaatccccaccccaatcccaaattttgttttggttctaactacctccagaatgtgttcaataaaatgcttttataatataatcgacagctctctcgcccagcccagttctggaagggataaaaagggggcatcaccgttcctgggtaacagagccaccttctgcgtcctgctgagctctgttctctccagcacctcccaacccactagtgcctggttctcttgctccaccaggaacaagccaccatgtctcgccagtcaagtgtgtccttccggagcgggggcagtcgtagcttcagcaccgcctctgccatcaccccgtctgtctcccgcaccagcttcacctccgtgtcccggtccgggggtggcggtggtggtggcttcggcagggtcagccttgcgggtgcttgtggagtgggtggctatggcagccggagcctctacaacctggggggctccaagaggatatccatcagcactagtggtggcagcttcaggaaccggtttggtgctggtgctggaggcggctatggctttggaggtggtgccggtagtggatttggtttcggcggtggagctggtggtggctttgggctcggtggcggagctggctttggaggtggcttcggtggccctggctttcctgtctgccctcctggaggtatccaagaggtcactgtcaaccagagtctcctgactcccctcaacctgcaaatcgaccccagcatccagagggtgaggaccgaggagcgcgagcagatcaagaccctcaacaataagtttgcctccttcatcgacaaggtgcggttcctggagcagcagaacaaggttctggacaccaagtggaccctgctgcaggagcagggcaccaagactgtgaggcagaacctggagccgttgttcgagcagtacatcaacaacctcaggaggcagctggacagcatcgtgggggaacggggccgcctggactcagagctgagaaacatgcaggacctggtggaagacttcaagaacaagtatgaggatgaaatcaacaagcgtaccactgctgagaatgagtttgtgatgctgaagaaggatgtagatgctgcctacatgaacaaggtggagctggaggccaaggttgatgcactgatggatgagattaacttcatgaagatgttctttgatgcggagctgtcccagatgcagacgcatgtctctgacacctcagtggtcctctccatggacaacaaccgcaacctggacctggatagcatcatcgctgaggtcaaggcccagtatgaggagattgccaaccgcagccggacagaagccgagtcctggtatcagaccaagtatgaggagctgcagcagacagctggccggcatggcgatgacctccgcaacaccaagcatgagatctctgagatgaaccggatgatccagaggctgagagccgagattgacaatgtcaagaaacagtgcgccaatctgcagaacgccattgcggatgccgagcagcgtggggagctggccctcaaggatgccaggaacaagctggccgagctggaggaggccctgcagaaggccaagcaggacatggcccggctgctgcgtgagtaccaggagctcatgaacaccaagctggccctggacgtggagatcgccacttaccgcaagctgctggagggcgaggaatgcagactcagtggagaaggagttggaccagtcaacatctctgttgtcacaagcagtgtttcctctggatatggcagtggcagtggctatggcggtggcctcggtggaggtcttggcggcggcctcggtggaggtcttgccggaggtagcagtggaagctactactccagcagcagtgggggtgtcggcctaggtggtgggctcagtgtggggggctctggcttcagtgcaagcagtggccgagggctgggggtgggctttggcagtggcgggggtagcagctccagcgtcaaatttgtctccaccacctcctcctcccggaagagcttcaagagctaagaacctgctgcaagtcactgccttccaagtgcagcaacccagcccatggagattgcctcttctaggcagttgctcaagccatgttttatccttttctggagagtagtctagaccaagccaattgcagaaccacattctttggttcccaggagagccccattcccagcccctggtctcccgtgccgcagttctatattctgcttcaaatcagccttcaggtttcccacagcatggcccctgctgacacgagaacccaaagttttcccaaatctaaatcatcaaaacagaatccccaccccaatcccaaattttgttttggttctaactacctccagaatgtgttcaataaaatgcttttataatataatcgacagctctctcgcccagcccagttctggaagggataaaaagggggcatcaccgttcctgggtaacagagccaccttctgcgtcctgctgagctctgttctctccagcacctcccaacccactagtgcctggttctcttgctccaccaggaacaagccaccatgtctcgccagtcaagtgtgtccttccggagcgggggcagtcgtagcttcagcaccgcctctgccatcaccccgtctgtctcccgcaccagcttcacctccgtgtcccggtccgggggtggcggtggtggtggcttcggcagggtcagccttgcgggtgcttgtggagtgggtggctatggcagccggagcctctacaacctggggggctccaagaggatatccatcagcactagtggtggcagcttcaggaaccggtttggtgctggtgctggaggcggctatggctttggaggtggtgccggtagtggatttggtttcggcggtggagctggtggtggctttgggctcggtggcggagctggctttggaggtggcttcggtggccctggctttcctgtctgccctcctggaggtatccaagaggtcactgtcaaccagagtctcctgactcccctcaacctgcaaatcgaccccagcatccagagggtgaggaccgaggagcgcgagcagatcaagaccctcaacaataagtttgcctccttcatcgacaaggtgcggttcctggagcagcagaacaaggttctggacaccaagtggaccctgctgcaggagcagggcaccaagactgtgaggcagaacctggagccgttgttcgagcagtacatcaacaacctcaggaggcagctggacagcatcgtgggggaacggggccgcctggactcagagctgagaaacatgcaggacctggtggaagacttcaagaacaagtatgaggatgaaatcaacaagcgtaccactgctgagaatgagtttgtgatgctgaagaaggatgtagatgctgcctacatgaacaaggtggagctggaggccaaggttgatgcactgatggatgagattaacttcatgaagatgttctttgatgcggagctgtcccagatgcagacgcatgtctctgacacctcagtggtcctctccatggacaacaaccgcaacctggacctggatagcatcatcgctgaggtcaaggcccagtatgaggagattgccaaccgcagccggacagaagccgagtcctggtatcagaccaagtatgaggagctgcagcagacagctggccggcatggcgatgacctccgcaacaccaagcatgagatctctgagatgaaccggatgatccagaggctgagagccgagattgacaatgtcaagaaacagtgcgccaatctgcagaacgccattgcggatgccgagcagcgtggggagctggccctcaaggatgccaggaacaagctggccgagctggaggaggccctgcagaaggccaagcaggacatggcccggctgctgcgtgagtaccaggagctcatgaacaccaagctggccctggacgtggagatcgccacttaccgcaagctgctggagggcgaggaatgcagactcagtggagaaggagttggaccagtcaacatctctgttgtcacaagcagtgtttcctctggatatggcagtggcagtggctatggcggtggcctcggtggaggtcttggcggcggcctcggtggaggtcttgccggaggtagcagtggaagctactactccagcagcagtgggggtgtcggcctaggtggtgggctcagtgtggggggctctggcttcagtgcaagcagtggccgagggctgggggtgggctttggcagtggcgggggtagcagctccagcgtcaaatttgtctccaccacctcctcctcccggaagagcttcaagagctaagaacctgctgcaagtcactgccttccaagtgcagcaacccagcccatggagattgcctcttctaggcagttgctcaagccatgttttatccttttctggagagtagtctagaccaagccaattgcagaaccacattctttggttcccaggagagccccattcccagcccctggtctcccgtgccgcagttctatattctgcttcaaatcagccttcaggtttcccacagcatggcccctgctgacacgagaacccaaagttttcccaaatctaaatcatcaaaacagaatccccaccccaatcccaaattttgttttggttctaactacctccagaatgtgttcaataaaatgcttttataatataatcgacagctctctcgcccagcccagttctggaagggataaaaagggggcatcaccgttcctgggtaacagagccaccttctgcgtcctgctgagctctgttctctccagcacctcccaacccactagtgcctggttctcttgctccaccaggaacaagccaccatgtctcgccagtcaagtgtgtccttccggagcgggggcagtcgtagcttcagcaccgcctctgccatcaccccgtctgtctcccgcaccagcttcacctccgtgtcccggtccgggggtggcggtggtggtggcttcggcagggtcagccttgcgggtgcttgtggagtgggtggctatggcagccggagcctctacaacctggggggctccaagaggatatccatcagcactagtggtggcagcttcaggaaccggtttggtgctggtgctggaggcggctatggctttggaggtggtgccggtagtggatttggtttcggcggtggagctggtggtggctttgggctcggtggcggagctggctttggaggtggcttcggtggccctggctttcctgtctgccctcctggaggtatccaagaggtcactgtcaaccagagtctcctgactcccctcaacctgcaaatcgaccccagcatccagagggtgaggaccgaggagcgcgagcagatcaagaccctcaacaataagtttgcctccttcatcgacaaggtgcggttcctggagcagcagaacaaggttctggacaccaagtggaccctgctgcaggagcagggcaccaagactgtgaggcagaacctggagccgttgttcgagcagtacatcaacaacctcaggaggcagctggacagcatcgtgggggaacggggccgcctggactcagagctgagaaacatgcaggacctggtggaagacttcaagaacaagtatgaggatgaaatcaacaagcgtaccactgctgagaatgagtttgtgatgctgaagaaggatgtagatgctgcctacatgaacaaggtggagctggaggccaaggttgatgcactgatggatgagattaacttcatgaagatgttctttgatgcggagctgtcccagatgcagacgcatgtctctgacacctcagtggtcctctccatggacaacaaccgcaacctggacctggatagcatcatcgctgaggtcaaggcccagtatgaggagattgccaaccgcagccggacagaagccgagtcctggtatcagaccaagtatgaggagctgcagcagacagctggccggcatggcgatgacctccgcaacaccaagcatgagatctctgagatgaaccggatgatccagaggctgagagccgagattgacaatgtcaagaaacagtgcgccaatctgcagaacgccattgcggatgccgagcagcgtggggagctggccctcaaggatgccaggaacaagctggccgagctggaggaggccctgcagaaggccaagcaggacatggcccggctgctgcgtgagtaccaggagctcatgaacaccaagctggccctggacgtggagatcgccacttaccgcaagctgctggagggcgaggaatgcagactcagtggagaaggagttggaccagtcaacatctctgttgtcacaagcagtgtttcctctggatatggcagtggcagtggctatggcggtggcctcggtggaggtcttggcggcggcctcggtggaggtcttgccggaggtagcagtggaagctactactccagcagcagtgggggtgtcggcctaggtggtgggctcagtgtggggggctctggcttcagtgcaagcagtggccgagggctgggggtgggctttggcagtggcgggggtagcagctccagcgtcaaatttgtctccaccacctcctcctcccggaagagcttcaagagctaagaacctgctgcaagtcactgccttccaagtgcagcaacccagcccatggagattgcctcttctaggcagttgctcaagccatgttttatccttttctggagagtagtctagaccaagccaattgcagaaccacattctttggttcccaggagagccccattcccagcccctggtctcccgtgccgcagttctatattctgcttcaaatcagccttcaggtttcccacagcatggcccctgctgacacgagaacccaaagttttcccaaatctaaatcatcaaaacagaatccccaccccaatcccaaattttgttttggttctaactacctccagaatgtgttcaataaaatgcttttataatataatcgacagctctctcgcccagcccagttctggaagggataaaaagggggcatcaccgttcctgggtaacagagccaccttctgcgtcctgctgagctctgttctctccagcacctcccaacccactagtgcctggttctcttgctccaccaggaacaagccaccatgtctcgccagtcaagtgtgtccttccggagcgggggcagtcgtagcttcagcaccgcctctgccatcaccccgtctgtctcccgcaccagcttcacctccgtgtcccggtccgggggtggcggtggtggtggcttcggcagggtcagccttgcgggtgcttgtggagtgggtggctatggcagccggagcctctacaacctggggggctccaagaggatatccatcagcactagtggtggcagcttcaggaaccggtttggtgctggtgctggaggcggctatggctttggaggtggtgccggtagtggatttggtttcggcggtggagctggtggtggctttgggctcggtggcggagctggctttggaggtggcttcggtggccctggctttcctgtctgccctcctggaggtatccaagaggtcactgtcaaccagagtctcctgactcccctcaacctgcaaatcgaccccagcatccagagggtgaggaccgaggagcgcgagcagatcaagaccctcaacaataagtttgcctccttcatcgacaaggtgcggttcctggagcagcagaacaaggttctggacaccaagtggaccctgctgcaggagcagggcaccaagactgtgaggcagaacctggagccgttgttcgagcagtacatcaacaacctcaggaggcagctggacagcatcgtgggggaacggggccgcctggactcagagctgagaaacatgcaggacctggtggaagacttcaagaacaagtatgaggatgaaatcaacaagcgtaccactgctgagaatgagtttgtgatgctgaagaaggatgtagatgctgcctacatgaacaaggtggagctggaggccaaggttgatgcactgatggatgagattaacttcatgaagatgttctttgatgcggagctgtcccagatgcagacgcatgtctctgacacctcagtggtcctctccatggacaacaaccgcaacctggacctggatagcatcatcgctgaggtcaaggcccagtatgaggagattgccaaccgcagccggacagaagccgagtcctggtatcagaccaagtatgaggagctgcagcagacagctggccggcatggcgatgacctccgcaacaccaagcatgagatctctgagatgaaccggatgatccagaggctgagagccgagattgacaatgtcaagaaacagtgcgccaatctgcagaacgccattgcggatgccgagcagcgtggggagctggccctcaaggatgccaggaacaagctggccgagctggaggaggccctgcagaaggccaagcaggacatggcccggctgctgcgtgagtaccaggagctcatgaacaccaagctggccctggacgtggagatcgccacttaccgcaagctgctggagggcgaggaatgcagactcagtggagaaggagttggaccagtcaacatctctgttgtcacaagcagtgtttcctctggatatggcagtggcagtggctatggcggtggcctcggtggaggtcttggcggcggcctcggtggaggtcttgccggaggtagcagtggaagctactactccagcagcagtgggggtgtcggcctaggtggtgggctcagtgtggggggctctggcttcagtgcaagcagtggccgagggctgggggtgggctttggcagtggcgggggtagcagctccagcgtcaaatttgtctccaccacctcctcctcccggaagagcttcaagagctaagaacctgctgcaagtcactgccttccaagtgcagcaacccagcccatggagattgcctcttctaggcagttgctcaagccatgttttatccttttctggagagtagtctagaccaagccaattgcagaaccacattctttggttcccaggagagccccattcccagcccctggtctcccgtgccgcagttctatattctgcttcaaatcagccttcaggtttcccacagcatggcccctgctgacacgagaacccaaagttttcccaaatctaaatcatcaaaacagaatccccaccccaatcccaaattttgttttggttctaactacctccagaatgtgttcaataaaatgcttttataatataatcgacagctctctcgcccagcccagttctggaagggataaaaagggggcatcaccgttcctgggtaacagagccaccttctgcgtcctgctgagctctgttctctccagcacctcccaacccactagtgcctggttctcttgctccaccaggaacaagccaccatgtctcgccagtcaagtgtgtccttccggagcgggggcagtcgtagcttcagcaccgcctctgccatcaccccgtctgtctcccgcaccagcttcacctccgtgtcccggtccgggggtggcggtggtggtggcttcggcagggtcagccttgcgggtgcttgtggagtgggtggctatggcagccggagcctctacaacctggggggctccaagaggatatccatcagcactagtggtggcagcttcaggaaccggtttggtgctggtgctggaggcggctatggctttggaggtggtgccggtagtggatttggtttcggcggtggagctggtggtggctttgggctcggtggcggagctggctttggaggtggcttcggtggccctggctttcctgtctgccctcctggaggtatccaagaggtcactgtcaaccagagtctcctgactcccctcaacctgcaaatcgaccccagcatccagagggtgaggaccgaggagcgcgagcagatcaagaccctcaacaataagtttgcctccttcatcgacaaggtgcggttcctggagcagcagaacaaggttctggacaccaagtggaccctgctgcaggagcagggcaccaagactgtgaggcagaacctggagccgttgttcgagcagtacatcaacaacctcaggaggcagctggacagcatcgtgggggaacggggccgcctggactcagagctgagaaacatgcaggacctggtggaagacttcaagaacaagtatgaggatgaaatcaacaagcgtaccactgctgagaatgagtttgtgatgctgaagaaggatgtagatgctgcctacatgaacaaggtggagctggaggccaaggttgatgcactgatggatgagattaacttcatgaagatgttctttgatgcggagctgtcccagatgcagacgcatgtctctgacacctcagtggtcctctccatggacaacaaccgcaacctggacctggatagcatcatcgctgaggtcaaggcccagtatgaggagattgccaaccgcagccggacagaagccgagtcctggtatcagaccaagtatgaggagctgcagcagacagctggccggcatggcgatgacctccgcaacaccaagcatgagatctctgagatgaaccggatgatccagaggctgagagccgagattgacaatgtcaagaaacagtgcgccaatctgcagaacgccattgcggatgccgagcagcgtggggagctggccctcaaggatgccaggaacaagctggccgagctggaggaggccctgcagaaggccaagcaggacatggcccggctgctgcgtgagtaccaggagctcatgaacaccaagctggccctggacgtggagatcgccacttaccgcaagctgctggagggcgaggaatgcagactcagtggagaaggagttggaccagtcaacatctctgttgtcacaagcagtgtttcctctggatatggcagtggcagtggctatggcggtggcctcggtggaggtcttggcggcggcctcggtggaggtcttgccggaggtagcagtggaagctactactccagcagcagtgggggtgtcggcctaggtggtgggctcagtgtggggggctctggcttcagtgcaagcagtggccgagggctgggggtgggctttggcagtggcgggggtagcagctccagcgtcaaatttgtctccaccacctcctcctcccggaagagcttcaagagctaagaacctgctgcaagtcactgccttccaagtgcagcaacccagcccatggagattgcctcttctaggcagttgctcaagccatgttttatccttttctggagagtagtctagaccaagccaattgcagaaccacattctttggttcccaggagagccccattcccagcccctggtctcccgtgccgcagttctatattctgcttcaaatcagccttcaggtttcccacagcatggcccctgctgacacgagaacccaaagttttcccaaatctaaatcatcaaaacagaatccccaccccaatcccaaattttgttttggttctaactacctccagaatgtgttcaataaaatgcttttataatataatcgacagctctctcgcccagcccagttctggaagggataaaaagggggcatcaccgttcctgggtaacagagccaccttctgcgtcctgctgagctctgttctctccagcacctcccaacccactagtgcctggttctcttgctccaccaggaacaagccaccatgtctcgccagtcaagtgtgtccttccggagcgggggcagtcgtagcttcagcaccgcctctgccatcaccccgtctgtctcccgcaccagcttcacctccgtgtcccggtccgggggtggcggtggtggtggcttcggcagggtcagccttgcgggtgcttgtggagtgggtggctatggcagccggagcctctacaacctggggggctccaagaggatatccatcagcactagtggtggcagcttcaggaaccggtttggtgctggtgctggaggcggctatggctttggaggtggtgccggtagtggatttggtttcggcggtggagctggtggtggctttgggctcggtggcggagctggctttggaggtggcttcggtggccctggctttcctgtctgccctcctggaggtatccaagaggtcactgtcaaccagagtctcctgactcccctcaacctgcaaatcgaccccagcatccagagggtgaggaccgaggagcgcgagcagatcaagaccctcaacaataagtttgcctccttcatcgacaaggtgcggttcctggagcagcagaacaaggttctggacaccaagtggaccctgctgcaggagcagggcaccaagactgtgaggcagaacctggagccgttgttcgagcagtacatcaacaacctcaggaggcagctggacagcatcgtgggggaacggggccgcctggactcagagctgagaaacatgcaggacctggtggaagacttcaagaacaagtatgaggatgaaatcaacaagcgtaccactgctgagaatgagtttgtgatgctgaagaaggatgtagatgctgcctacatgaacaaggtggagctggaggccaaggttgatgcactgatggatgagattaacttcatgaagatgttctttgatgcggagctgtcccagatgcagacgcatgtctctgacacctcagtggtcctctccatggacaacaaccgcaacctggacctggatagcatcatcgctgaggtcaaggcccagtatgaggagattgccaaccgcagccggacagaagccgagtcctggtatcagaccaagtatgaggagctgcagcagacagctggccggcatggcgatgacctccgcaacaccaagcatgagatctctgagatgaaccggatgatccagaggctgagagccgagattgacaatgtcaagaaacagtgcgccaatctgcagaacgccattgcggatgccgagcagcgtggggagctggccctcaaggatgccaggaacaagctggccgagctggaggaggccctgcagaaggccaagcaggacatggcccggctgctgcgtgagtaccaggagctcatgaacaccaagctggccctggacgtggagatcgccacttaccgcaagctgctggagggcgaggaatgcagactcagtggagaaggagttggaccagtcaacatctctgttgtcacaagcagtgtttcctctggatatggcagtggcagtggctatggcggtggcctcggtggaggtcttggcggcggcctcggtggaggtcttgccggaggtagcagtggaagctactactccagcagcagtgggggtgtcggcctaggtggtgggctcagtgtggggggctctggcttcagtgcaagcagtggccgagggctgggggtgggctttggcagtggcgggggtagcagctccagcgtcaaatttgtctccaccacctcctcctcccggaagagcttcaagagctaagaacctgctgcaagtcactgccttccaagtgcagcaacccagcccatggagattgcctcttctaggcagttgctcaagccatgttttatccttttctggagagtagtctagaccaagccaattgcagaaccacattctttggttcccaggagagccccattcccagcccctggtctcccgtgccgcagttctatattctgcttcaaatcagccttcaggtttcccacagcatggcccctgctgacacgagaacccaaagttttcccaaatctaaatcatcaaaacagaatccccaccccaatcccaaattttgttttggttctaactacctccagaatgtgttcaataaaatgcttttataatataatcgacagctctctcgcccagcccagttctggaagggataaaaagggggcatcaccgttcctgggtaacagagccaccttctgcgtcctgctgagctctgttctctccagcacctcccaacccactagtgcctggttctcttgctccaccaggaacaagccaccatgtctcgccagtcaagtgtgtccttccggagcgggggcagtcgtagcttcagcaccgcctctgccatcaccccgtctgtctcccgcaccagcttcacctccgtgtcccggtccgggggtggcggtggtggtggcttcggcagggtcagccttgcgggtgcttgtggagtgggtggctatggcagccggagcctctacaacctggggggctccaagaggatatccatcagcactagtggtggcagcttcaggaaccggtttggtgctggtgctggaggcggctatggctttggaggtggtgccggtagtggatttggtttcggcggtggagctggtggtggctttgggctcggtggcggagctggctttggaggtggcttcggtggccctggctttcctgtctgccctcctggaggtatccaagaggtcactgtcaaccagagtctcctgactcccctcaacctgcaaatcgaccccagcatccagagggtgaggaccgaggagcgcgagcagatcaagaccctcaacaataagtttgcctccttcatcgacaaggtgcggttcctggagcagcagaacaaggttctggacaccaagtggaccctgctgcaggagcagggcaccaagactgtgaggcagaacctggagccgttgttcgagcagtacatcaacaacctcaggaggcagctggacagcatcgtgggggaacggggccgcctggactcagagctgagaaacatgcaggacctggtggaagacttcaagaacaagtatgaggatgaaatcaacaagcgtaccactgctgagaatgagtttgtgatgctgaagaaggatgtagatgctgcctacatgaacaaggtggagctggaggccaaggttgatgcactgatggatgagattaacttcatgaagatgttctttgatgcggagctgtcccagatgcagacgcatgtctctgacacctcagtggtcctctccatggacaacaaccgcaacctggacctggatagcatcatcgctgaggtcaaggcccagtatgaggagattgccaaccgcagccggacagaagccgagtcctggtatcagaccaagtatgaggagctgcagcagacagctggccggcatggcgatgacctccgcaacaccaagcatgagatctctgagatgaaccggatgatccagaggctgagagccgagattgacaatgtcaagaaacagtgcgccaatctgcagaacgccattgcggatgccgagcagcgtggggagctggccctcaaggatgccaggaacaagctggccgagctggaggaggccctgcagaaggccaagcaggacatggcccggctgctgcgtgagtaccaggagctcatgaacaccaagctggccctggacgtggagatcgccacttaccgcaagctgctggagggcgaggaatgcagactcagtggagaaggagttggaccagtcaacatctctgttgtcacaagcagtgtttcctctggatatggcagtggcagtggctatggcggtggcctcggtggaggtcttggcggcggcctcggtggaggtcttgccggaggtagcagtggaagctactactccagcagcagtgggggtgtcggcctaggtggtgggctcagtgtggggggctctggcttcagtgcaagcagtggccgagggctgggggtgggctttggcagtggcgggggtagcagctccagcgtcaaatttgtctccaccacctcctcctcccggaagagcttcaagagctaagaacctgctgcaagtcactgccttccaagtgcagcaacccagcccatggagattgcctcttctaggcagttgctcaagccatgttttatccttttctggagagtagtctagaccaagccaattgcagaaccacattctttggttcccaggagagccccattcccagcccctggtctcccgtgccgcagttctatattctgcttcaaatcagccttcaggtttcccacagcatggcccctgctgacacgagaacccaaagttttcccaaatctaaatcatcaaaacagaatccccaccccaatcccaaattttgttttggttctaactacctccagaatgtgttcaataaaatgcttttataatataatcgacagctctctcgcccagcccagttctggaagggataaaaagggggcatcaccgttcctgggtaacagagccaccttctgcgtcctgctgagctctgttctctccagcacctcccaacccactagtgcctggttctcttgctccaccaggaacaagccaccatgtctcgccagtcaagtgtgtccttccggagcgggggcagtcgtagcttcagcaccgcctctgccatcaccccgtctgtctcccgcaccagcttcacctccgtgtcccggtccgggggtggcggtggtggtggcttcggcagggtcagccttgcgggtgcttgtggagtgggtggctatggcagccggagcctctacaacctggggggctccaagaggatatccatcagcactagtggtggcagcttcaggaaccggtttggtgctggtgctggaggcggctatggctttggaggtggtgccggtagtggatttggtttcggcggtggagctggtggtggctttgggctcggtggcggagctggctttggaggtggcttcggtggccctggctttcctgtctgccctcctggaggtatccaagaggtcactgtcaaccagagtctcctgactcccctcaacctgcaaatcgaccccagcatccagagggtgaggaccgaggagcgcgagcagatcaagaccctcaacaataagtttgcctccttcatcgacaaggtgcggttcctggagcagcagaacaaggttctggacaccaagtggaccctgctgcaggagcagggcaccaagactgtgaggcagaacctggagccgttgttcgagcagtacatcaacaacctcaggaggcagctggacagcatcgtgggggaacggggccgcctggactcagagctgagaaacatgcaggacctggtggaagacttcaagaacaagtatgaggatgaaatcaacaagcgtaccactgctgagaatgagtttgtgatgctgaagaaggatgtagatgctgcctacatgaacaaggtggagctggaggccaaggttgatgcactgatggatgagattaacttcatgaagatgttctttgatgcggagctgtcccagatgcagacgcatgtctctgacacctcagtggtcctctccatggacaacaaccgcaacctggacctggatagcatcatcgctgaggtcaaggcccagtatgaggagattgccaaccgcagccggacagaagccgagtcctggtatcagaccaagtatgaggagctgcagcagacagctggccggcatggcgatgacctccgcaacaccaagcatgagatctctgagatgaaccggatgatccagaggctgagagccgagattgacaatgtcaagaaacagtgcgccaatctgcagaacgccattgcggatgccgagcagcgtggggagctggccctcaaggatgccaggaacaagctggccgagctggaggaggccctgcagaaggccaagcaggacatggcccggctgctgcgtgagtaccaggagctcatgaacaccaagctggccctggacgtggagatcgccacttaccgcaagctgctggagggcgaggaatgcagactcagtggagaaggagttggaccagtcaacatctctgttgtcacaagcagtgtttcctctggatatggcagtggcagtggctatggcggtggcctcggtggaggtcttggcggcggcctcggtggaggtcttgccggaggtagcagtggaagctactactccagcagcagtgggggtgtcggcctaggtggtgggctcagtgtggggggctctggcttcagtgcaagcagtggccgagggctgggggtgggctttggcagtggcgggggtagcagctccagcgtcaaatttgtctccaccacctcctcctcccggaagagcttcaagagctaagaacctgctgcaagtcactgccttccaagtgcagcaacccagcccatggagattgcctcttctaggcagttgctcaagccatgttttatccttttctggagagtagtctagaccaagccaattgcagaaccacattctttggttcccaggagagccccattcccagcccctggtctcccgtgccgcagttctatattctgcttcaaatcagccttcaggtttcccacagcatggcccctgctgacacgagaacccaaagttttcccaaatctaaatcatcaaaacagaatccccaccccaatcccaaattttgttttggttctaactacctccagaatgtgttcaataaaatgcttttataatataatcgacagctctctcgcccagcccagttctggaagggataaaaagggggcatcaccgttcctgggtaacagagccaccttctgcgtcctgctgagctctgttctctccagcacctcccaacccactagtgcctggttctcttgctccaccaggaacaagccaccatgtctcgccagtcaagtgtgtccttccggagcgggggcagtcgtagcttcagcaccgcctctgccatcaccccgtctgtctcccgcaccagcttcacctccgtgtcccggtccgggggtggcggtggtggtggcttcggcagggtcagccttgcgggtgcttgtggagtgggtggctatggcagccggagcctctacaacctggggggctccaagaggatatccatcagcactagtggtggcagcttcaggaaccggtttggtgctggtgctggaggcggctatggctttggaggtggtgccggtagtggatttggtttcggcggtggagctggtggtggctttgggctcggtggcggagctggctttggaggtggcttcggtggccctggctttcctgtctgccctcctggaggtatccaagaggtcactgtcaaccagagtctcctgactcccctcaacctgcaaatcgaccccagcatccagagggtgaggaccgaggagcgcgagcagatcaagaccctcaacaataagtttgcctccttcatcgacaaggtgcggttcctggagcagcagaacaaggttctggacaccaagtggaccctgctgcaggagcagggcaccaagactgtgaggcagaacctggagccgttgttcgagcagtacatcaacaacctcaggaggcagctggacagcatcgtgggggaacggggccgcctggactcagagctgagaaacatgcaggacctggtggaagacttcaagaacaagtatgaggatgaaatcaacaagcgtaccactgctgagaatgagtttgtgatgctgaagaaggatgtagatgctgcctacatgaacaaggtggagctggaggccaaggttgatgcactgatggatgagattaacttcatgaagatgttctttgatgcggagctgtcccagatgcagacgcatgtctctgacacctcagtggtcctctccatggacaacaaccgcaacctggacctggatagcatcatcgctgaggtcaaggcccagtatgaggagattgccaaccgcagccggacagaagccgagtcctggtatcagaccaagtatgaggagctgcagcagacagctggccggcatggcgatgacctccgcaacaccaagcatgagatctctgagatgaaccggatgatccagaggctgagagccgagattgacaatgtcaagaaacagtgcgccaatctgcagaacgccattgcggatgccgagcagcgtggggagctggccctcaaggatgccaggaacaagctggccgagctggaggaggccctgcagaaggccaagcaggacatggcccggctgctgcgtgagtaccaggagctcatgaacaccaagctggccctggacgtggagatcgccacttaccgcaagctgctggagggcgaggaatgcagactcagtggagaaggagttggaccagtcaacatctctgttgtcacaagcagtgtttcctctggatatggcagtggcagtggctatggcggtggcctcggtggaggtcttggcggcggcctcggtggaggtcttgccggaggtagcagtggaagctactactccagcagcagtgggggtgtcggcctaggtggtgggctcagtgtggggggctctggcttcagtgcaagcagtggccgagggctgggggtgggctttggcagtggcgggggtagcagctccagcgtcaaatttgtctccaccacctcctcctcccggaagagcttcaagagctaagaacctgctgcaagtcactgccttccaagtgcagcaacccagcccatggagattgcctcttctaggcagttgctcaagccatgttttatccttttctggagagtagtctagaccaagccaattgcagaaccacattctttggttcccaggagagccccattcccagcccctggtctcccgtgccgcagttctatattctgcttcaaatcagccttcaggtttcccacagcatggcccctgctgacacgagaacccaaagttttcccaaatctaaatcatcaaaacagaatccccaccccaatcccaaattttgttttggttctaactacctccagaatgtgttcaataaaatgcttttataatataatcgacagctctctcgcccagcccagttctggaagggataaaaagggggcatcaccgttcctgggtaacagagccaccttctgcgtcctgctgagctctgttctctccagcacctcccaacccactagtgcctggttctcttgctccaccaggaacaagccaccatgtctcgccagtcaagtgtgtccttccggagcgggggcagtcgtagcttcagcaccgcctctgccatcaccccgtctgtctcccgcaccagcttcacctccgtgtcccggtccgggggtggcggtggtggtggcttcggcagggtcagccttgcgggtgcttgtggagtgggtggctatggcagccggagcctctacaacctggggggctccaagaggatatccatcagcactagtggtggcagcttcaggaaccggtttggtgctggtgctggaggcggctatggctttggaggtggtgccggtagtggatttggtttcggcggtggagctggtggtggctttgggctcggtggcggagctggctttggaggtggcttcggtggccctggctttcctgtctgccctcctggaggtatccaagaggtcactgtcaaccagagtctcctgactcccctcaacctgcaaatcgaccccagcatccagagggtgaggaccgaggagcgcgagcagatcaagaccctcaacaataagtttgcctccttcatcgacaaggtgcggttcctggagcagcagaacaaggttctggacaccaagtggaccctgctgcaggagcagggcaccaagactgtgaggcagaacctggagccgttgttcgagcagtacatcaacaacctcaggaggcagctggacagcatcgtgggggaacggggccgcctggactcagagctgagaaacatgcaggacctggtggaagacttcaagaacaagtatgaggatgaaatcaacaagcgtaccactgctgagaatgagtttgtgatgctgaagaaggatgtagatgctgcctacatgaacaaggtggagctggaggccaaggttgatgcactgatggatgagattaacttcatgaagatgttctttgatgcggagctgtcccagatgcagacgcatgtctctgacacctcagtggtcctctccatggacaacaaccgcaacctggacctggatagcatcatcgctgaggtcaaggcccagtatgaggagattgccaaccgcagccggacagaagccgagtcctggtatcagaccaagtatgaggagctgcagcagacagctggccggcatggcgatgacctccgcaacaccaagcatgagatctctgagatgaaccggatgatccagaggctgagagccgagattgacaatgtcaagaaacagtgcgccaatctgcagaacgccattgcggatgccgagcagcgtggggagctggccctcaaggatgccaggaacaagctggccgagctggaggaggccctgcagaaggccaagcaggacatggcccggctgctgcgtgagtaccaggagctcatgaacaccaagctggccctggacgtggagatcgccacttaccgcaagctgctggagggcgaggaatgcagactcagtggagaaggagttggaccagtcaacatctctgttgtcacaagcagtgtttcctctggatatggcagtggcagtggctatggcggtggcctcggtggaggtcttggcggcggcctcggtggaggtcttgccggaggtagcagtggaagctactactccagcagcagtgggggtgtcggcctaggtggtgggctcagtgtggggggctctggcttcagtgcaagcagtggccgagggctgggggtgggctttggcagtggcgggggtagcagctccagcgtcaaatttgtctccaccacctcctcctcccggaagagcttcaagagctaagaacctgctgcaagtcactgccttccaagtgcagcaacccagcccatggagattgcctcttctaggcagttgctcaagccatgttttatccttttctggagagtagtctagaccaagccaattgcagaaccacattctttggttcccaggagagccccattcccagcccctggtctcccgtgccgcagttctatattctgcttcaaatcagccttcaggtttcccacagcatggcccctgctgacacgagaacccaaagttttcccaaatctaaatcatcaaaacagaatccccaccccaatcccaaattttgttttggttctaactacctccagaatgtgttcaataaaatgcttttataatataatcgacagctctctcgcccagcccagttctggaagggataaaaagggggcatcaccgttcctgggtaacagagccaccttctgcgtcctgctgagctctgttctctccagcacctcccaacccactagtgcctggttctcttgctccaccaggaacaagccaccatgtctcgccagtcaagtgtgtccttccggagcgggggcagtcgtagcttcagcaccgcctctgccatcaccccgtctgtctcccgcaccagcttcacctccgtgtcccggtccgggggtggcggtggtggtggcttcggcagggtca

SEQ ID NO: 829 - DNA, 3023 bp, Homo sapiens
  misc_feature (269)..(269): second gene starts at position 269
atgaacggacagttggatctaagtgggaagctaatcatcaaagctcaacttggggaggatattcggcgaattcctattcataatgaagatattacttatgatgaattagtgctaatgatgcaacgagttttcagaggaaaacttctgagtaatgatgaagtaacaataaagtataaagatgaagatggagatcttataacaatttttgatagttctgacctttcctttgcaattcagtgcagtaggatactgaaactgacattatttggaaaatctacttcctcatcaagcacccctacagagttctgcaggaatggtggaacctgggaaaatggcagatgtatttgtacagaagagtggaaaggactgagatgtacaattgctaatttttgtgaaaatagtacctatatgggttttacttttgccagaatcccagtgggcagatatggaccatccttgcaaacatgtggcaaggatactccaaatgcgggcaatccaatggcagtccggttgtgcagtctctctctatatggagagatagaattacaaaaagtgacaataggaaattgcaatgaaaatctggaaaccctggaaaagcaggtaaaggatgtcacagcaccacttaataacatttcttctgaagtccagattttaacatctgatgccaataaattaactgctgagaacatcactagtgctacgcgagtggttggacagatattcaacacttccagaaatgcttcacctgaggcaaagaaagttgccatagtaacagtgagtcaactcctagatgccagtgaagatgcttttcaaagagttgctgctactgctaatgatgatgcccttacaacgcttattgagcaaatggagacttattccttgtctttgggtaatcaatcagtggtggaacctaacatagcaatacagtcagcaaatttctcttcagaaaatgcggtggggccttcaaatgttcgcttctctgtgcagaaaggagctagcagttctctagtttctagttcaacatttatacatacaaatgtggatggccttaacccagatgcacagactgagcttcaggtcttgcttaatatgacgaaaaattacaccaagacatgcggctttgtagtttatcaaaatgacaagcttttccaatcaaaaacttttacagctaaatcggattttagtcaaaaaattatctcaagcaaaactgatgaaaatgagcaagatcagagtgcttctgttgacatggtctttagtccaaagtacaaccaaaaagaatttcaactctattcctatgcctgtgtctattggaatttgtcagcgaaggactgggacacatatggctgtcaaaaagacaagggcactgatggattcctgcgctgccgctgcaaccatactactaattttgctgtattaatgactttcaaaaaggattatcaatatcccaaatcacttgacatattatccaacgttggatgtgcactgtctgttactggtctggctctcacagttatatttcagattgtcaccaggaaagtcagaaaaacctcagtaacctgggttttggtcaatctgtgcatatcaatgttgattttcaacctcctctttgtgtttggaattgaaaactccaataagaacttgcagacaagtgatggtgacatcaataatattgactttgacaataatgacatacccaggacagacaccattaacatcccgaatcccatgtgcactgcgattgccgccttactgcactattttctgttagtgacatttacctggaacgcactcagcgctgcacagctctattaccttctaataaggaccatgaagcctcttcctcggcatttcattcttttcatctcattaattggatggggagtcccagctatagtagtggctataacagtgggagttatttattctcagaatggaaataatccacagtgggaattagactaccggcaagagaaaatctgctggctggcaattccagaacccaatggtgttataaaaagtccgctgttgtggtcattcatcgtacctgtaaccattatcctcatcagcaatgttgttatgtttattacaatctcgatcaaagtgctgtggaagaataaccagaacctgacaagcacaaaaaaagtttcatccatgaagaagattgttagcacattatctgttgcagttgtttttggaattacctggattctagcatacctgatgctagttaatgatgatagcatcaggatcgtcttcagctacatattctgccttttcaacactacacagggattgcaaatttttatcctgtacactgttagaacaaaagtcttccagagtgaagcttccaaagtgttgatgttgctatcgtctattgggagaaggaagtcattgccttcagtgacgcggccgaggctgcgtgtaaagatgtataatttcctcaggtcattgccaaccttacatgaacgctttaggctactggaaacctctccgagtactgaggaaatcacactctctgaaagtgacaatgcaaaggaaagcatctagacagtaaaacttacctgttgtggtctttttaatcacctcgtttgagttttatctgtttctctcctttatttcccagtcctctcagaaagtcttcctcaatgtattttgctcaggattaagaattagataaaacctgttgtttattattattcggcataatggacttggtagtttttctatttttcaatagatttgtacttgaataaggtgaagaatttcacacaacatacaagagtaccattgttccttatatcgttaaatctttgtgacacactttgacaaaaatgtagaacctataacaaattcttttacaagttactataaaggacacaaagagaaaactttaccttccagaacaaaatgactcctgatgaacagtgtgtggggatttgcttgtatgtattaaacttttgacctctgaatattttacagtcgtatgtgcttgtacttttatttccaatgaagaatttggcacc

SEQ ID NO: 830 - DNA, 3023 bp, Homo sapiens; identical to SEQ ID NO: 829
  misc_feature (269)..(269): second gene starts at position 269

SEQ ID NO: 831 - DNA, 3023 bp, Homo sapiens; identical to SEQ ID NO: 829
  misc_feature (269)..(269): second gene starts at position 269

SEQ ID NO: 832 - DNA, 3023 bp, Homo sapiens; identical to SEQ ID NO: 829
  misc_feature (269)..(269): second gene starts at position 269

SEQ ID NO: 833 - DNA, 943 bp, Homo sapiens
  misc_feature (186)..(186): second gene starts at position 186
atgagttgtgtgccatggaaaggagacaaggccaaatctgaatcattggagctgccccaggcagcacccccacaaatctaccatgagaaacagcgcagggagctttgtgccctccacgccctcaataacgtcttccaggacagcaatgccttcacccgggatacgctgcaagagattttccagagccccccgggaccctccaggtcaggccaagccgagaggggctccggtgaaacggccccggaagacgaaggcaattcaggcccagaaactgcggaactcggccaagggaaaggtgcccaagtcggcactggacgagtaccggaagcgagagtgtcgagaccacctcagagtaaacctgaagtttctgaccaggacgagaagcaccgtggctgagtctgtgagccagcagattttgcgccagaaccggggccgcaaggcctgtgaccggcctgtggccaagaccaagaagaagaaggctgagggcaccgtgttcaccgaggaagacttccagaagttccagcaggaatacttcggcagctaggctccctggagggcacggtgaagaggccttcaagccctgcagcctccgactcctgctggctccaggaaccggccgtgccgcgcggccagcagatggcgatgcaggaccagcctggctcgaggaagccgcggagctgagccgagtggaggctggaatggagctggtgggccggaagtcctggggaggatttacacacagaccggagctggcttccgcaggcctgggcagagcatctgcacctgccggaaaggaacgtatctgttttgtttgcttttgcccaggtggggcctctgggctgtttgctgtggagcaaggctaattcctgagcccttggggacgacagctccaggagtaggaagaagggtgggcttccaagttacaataaatgtgaacccaaga

SEQ ID NO: 834 - DNA, 2894 bp, Homo sapiens
  misc_feature (2160)..(2160): second gene starts at position 2160
atgttttccgccctgaagaagctggtggggtcggaccaggccccgggccgggacaagaacatccccgccgggctgcagtccatgaaccaggcgttgcagaggcgcttcgccaagggggtgcagtacaacatgaagatagtgatccggggagacaggaacacgggcaagacagcgctgtggcaccgcctgcagggccggccgttcgtggaggagtacatccccacacaggagatccaggtcaccagcatccactggagctacaagaccacggatgacatcgtgaaggttgaagtctgggatgtagtagacaaaggaaaatgcaaaaagcgaggcgacggcttaaagatggagaacgacccccaggaggcggagtctgaaatggccctggatgctgagttcctggacgtgtacaagaactgcaacggggtggtcatgatgttcgacattaccaagcagtggaccttcaattacattctccgggagcttccaaaagtgcccacccacgtgccagtgtgcgtgctgggaaactaccgggacatgggcgagcaccgagtcatcctgccggacgacgtgcgtgacttcatcgacaacctggacagacctccaggttcctcctacttccgctatgctgagtcttccatgaagaacagcttcggcctaaagtaccttcataagttcttcaatatcccatttttgcagcttcagagggagacgctgttgcggcagctggagacgaaccagctggacatggacgccacgctggaggagctgtcggtgcagcaggagacggaggaccagaactacggcatcttcctggagatgatggaggctcgcagccgtggccatgcgtccccactggcggccaacgggcagagcccatccccgggctcccagtcaccagtggtgcctgcaggcgctgtgtccacggggagctccagccccggcacaccccagcccgccccacagctgcccctcaatgccgccccaccatcctctgtgccccctgtaccaccctcagaggccctgcccccacctgcgtgcccctcagcccccgccccacggcgcagcatcatctctaggctgtttgggacgtcacctgccaccgaggcagcccctccacctccagagccagtcccggccgcagagggcccagcaacggtccagagtgtggaggactttgttcctgacgaccgcctggaccgcagcttcctggaagacacaacccccgccagggacgagaagaaggtgggggccaaggctgcccagcaggacagcgacagtgatggggaggccctgggcggcaacccgatggtggcagggttccaggacgatgtggacctcgaagaccagccacgtgggagtcccccgctgcctgcaggccccgtccccagtcaagacatcactctttcgagtgaggaggaagcagaagtggcagctcccacaaaaggccctgccccagctccccagcagtgctcagagccagagaccaagtggtcctccataccagcttcgaagccacggagggggacagctcccacgaggaccgcagcacccccctggccaggcggtgtctctgttcgcacaggtccggagaagcgcagcagcaccaggccccctgctgagatggagccggggaagggtgagcaggcctcctcgtcggagagtgaccccgagggacccattgctgcacaaatgctgtccttcgtcatggatgaccccgactttgagagcgagggatcagacacacagcgcagggcggatgactttcccgtgcgagatgacccctccgatgtgactgacgaggatgagggccctgccgagccgcccccaccccccaagctccctctccccgccttcagactgaagaatgactcggacctcttcgggctggggctggaggaggccggacccaaggagagcagtgaggaaggtaaggagggcaaaaccccctctaaggagaagaagaagaagaagaaaaaaggcaaagaggaagaagaaaaagctgccaagaagaagagcaaacacaagaagagcaaggacaaggaggagggcaaggaggagcggcgacggcggcagcagcggcccccgcgcagcagggagaggacggctgccgatgagctggaggctttcctggggggcggggccccgggcggccgccaggccccggcggccgccatggcggacagcggcaccgcggggggcgcggcgttggcggccccggcccccgggccgggcagtggcggcccaggaccacgcgtctactttcagagcccccccggggccgcaggagagggcccgggcggggcggacgatgagggcccagtgaggcgccaagggaaggtcaccgtcaagtatgaccgcaaggagctacggaagcgcctcaacctagaggagtggatcctggagcagctcacgcgcctctacgactgccaggaagaggagatcccagaactggagattgacgtggatgagctcctggacatggagagtgacgatgcccgggctgccagggtcaaggagctgctggttgactgttacaaacccacagaggccttcatttctggcctgctggacaagatccggggcatgcagaagctgagcacaccccagaagaagtgacggtccccgacccaggagaacggtggctcccacaggacaatcgctgccccccaacctcgtagcaacagcaataccgggggaccctgcggccaggcctggtgccatgagcagggctcctcgtgcccctggcccaggggtctcttcccctgccccctcagttttccacttttggggttttttattgttattaaactgatgggactttttgtgtttttatattgactctgcggcgcgggccctttaataaagctaggatacgcctttggtgcagctaa

SEQ ID NO: 835 - DNA, 2897 bp, Homo sapiens
  misc_feature (2163)..(2163): second gene starts at position 2163
atgttttccgccctgaagaagctggtggggtcggaccaggccccgggccgggacaagaacatccccgccgggctgcagtccatgaaccaggcgttgcagaggcgcttcgccaagggggtgcagtacaacatgaagatagtgatccggggagacaggaacacgggcaagacagcgctgtggcaccgcctgcagggccggccgttcgtggaggagtacatccccacacaggagatccaggtcaccagcatccactggagctacaagaccacggatgacatcgtgaaggttgaagtctgggatgtagtagacaaaggaaaatgcaaaaagcgaggcgacggcttaaagatggagaacgacccccaggaggcggagtctgaaatggccctggatgctgagttcctggacgtgtacaagaactgcaacggggtggtcatgatgttcgacattaccaagcagtggaccttcaattacattctccgggagcttccaaaagtgcccacccacgtgccagtgtgcgtgctgggaaactaccgggacatgggcgagcaccgagtcatcctgccggacgacgtgcgtgacttcatcgacaacctggacagcagacctccaggttcctcctacttccgctatgctgagtcttccatgaagaacagcttcggcctaaagtaccttcataagttcttcaatatcccatttttgcagcttcagagggagacgctgttgcggcagctggagacgaaccagctggacatggacgccacgctggaggagctgtcggtgcagcaggagacggaggaccagaactacggcatcttcctggagatgatggaggctcgcagccgtggccatgcgtccccactggcggccaacgggcagagcccatccccgggctcccagtcaccagtggtgcctgcaggcgctgtgtccacggggagctccagccccggcacaccccagcccgccccacagctgcccctcaatgccgccccaccatcctctgtgccccctgtaccaccctcagaggccctgcccccacctgcgtgcccctcagcccccgccccacggcgcagcatcatctctaggctgtttgggacgtcacctgccaccgaggcagcccctccacctccagagccagtcccggccgcagagggcccagcaacggtccagagtgtggaggactttgttcctgacgaccgcctggaccgcagcttcctggaagacacaacccccgccagggacgagaagaaggtgggggccaaggctgcccagcaggacagcgacagtgatggggaggccctgggcggcaacccgatggtggcagggttccaggacgatgtggacctcgaagaccagccacgtgggagtcccccgctgcctgcaggccccgtccccagtcaagacatcactctttcgagtgaggaggaagcagaagtggcagctcccacaaaaggccctgccccagctccccagcagtgctcagagccagagaccaagtggtcctccataccagcttcgaagccacggagggggacagctcccacgaggaccgcagcacccccctggccaggcggtgtctctgttcgcacaggtccggagaagcgcagcagcaccaggccccctgctgagatggagccggggaagggtgagcaggcctcctcgtcggagagtgaccccgagggacccattgctgcacaaatgctgtccttcgtcatggatgaccccgactttgagagcgagggatcagacacacagcgcagggcggatgactttcccgtgcgagatgacccctccgatgtgactgacgaggatgagggccctgccgagccgcccccaccccccaagctccctctccccgccttcagactgaagaatgactcggacctcttcgggctggggctggaggaggccggacccaaggagagcagtgaggaaggtaaggagggcaaaaccccctctaaggagaagaagaagaagaagaaaaaaggcaaagaggaagaagaaaaagctgccaagaagaagagcaaacacaagaagagcaaggacaaggaggagggcaaggaggagcggcgacggcggcagcagcggcccccgcgcagcagggagaggacggctgccgatgagctggaggctttcctggggggcggggccccgggcggccgccaggccccggcggccgccatggcggacagcggcaccgcggggggcgcggcgttggcggccccggcccccgggccgggcagtggcggcccaggaccacgcgtctactttcagagcccccccggggccgcaggagagggcccgggcggggcggacgatgagggcccagtgaggcgccaagggaaggtcaccgtcaagtatgaccgcaaggagctacggaagcgcctcaacctagaggagtggatcctggagcagctcacgcgcctctacgactgccaggaagaggagatcccagaactggagattgacgtggatgagctcctggacatggagagtgacgatgcccgggctgccagggtcaaggagctgctggttgactgttacaaacccacagaggccttcatttctggcctgctggacaagatccggggcatgcagaagctgagcacaccccagaagaagtgacggtccccgacccaggagaacggtggctcccacaggacaatcgctgccccccaacctcgtagcaacagcaataccgggggaccctgcggccaggcctggtgccatgagcagggctcctcgtgcccctggcccaggggtctcttcccctgccccctcagttttccacttttggggttttttattgttattaaactgatgggactttttgtgtttttatattgactctgcggcgcgggccctttaataaagctaggatacgcctttggtgcagctaa

SEQ ID NO: 836 - DNA, 6737 bp, Homo sapiens
  misc_feature (56)..(56): second gene starts at position 56
atgtcgtcgtccttcttcaaccccagcttcgccttcagctcgcacttcgaccccgttacagatgtagagctaaaacgactgaaggatgctttcaagaggacctgtggactctcatattacatgggccagcactgcttcatccgggaagtgcttggggatggagtgcctccaaaggttgctgaggtgatttactgttcttttggtggaacatccaaagggctgcacttcaataatttaatagttggacttgtcctccttacaagaggcaaagatgaagagaaagcaaaatacatttttagtcttttttcaagtgaatctgggaactatgttatacgggaagaaatggaaagaatgctccacgtggtggatggtaaagtcccagatacactcaggaagtgtttctcagagggtgaaaaggtaaactatgaaaagtttagaaattggctttttctaaacaaagatgcttttactttctctcgatggcttctatctggaggtgtgtatgttaccctcactgatgatagtgatactcctactttctaccaaactctggctggagtcacacatttggaggaatcagacatcattgatcttgagaaacgctattggttattgaaggctcaatcccggactggacgatttgatttagagacatttggcccattggtttcaccacctattcgtccatctctaagtgaaggtttgtttaatgcttttgatgaaaatcgtgacaatcacatagattttaaggagatatcctgtgggttatcagcctgttgcaggggacccctggctgaaagacaaaaattttgcttcaaggtatttgatgttgaccgtgatggagttctctccagggttgaactgagagacatggtggttgcacttttagaagtctggaaggacaaccgcactgatgatattcctgaattacatatggatctctctgatattgtagaaggcatactgaatgcacatgacaccacaaagatgggtcatcttactctggaagactatcagatctggagtgtgaaaaatgttcttgccaatgagtttttgaacctccttttccaggtgtgtcacatagttctggggttaagaccagctactccggaagaagaaggacaaattattagaggatggttagaacgagagagcaggtatggtctgcaagcaggacacaactggtttatcatctccatgcagtggtggcaacagtggaaagaatatgtcaaatacgatgccaaccctgtggtaattgagccatcatctgttttgaatggaggaaaatactcatttggaactgcagcccatcctatggagcaggtcgaagatagaattggaagcagcctcagttacgtgaatactacagaagagaaattttcagacaacatttctactgcatctgaagcctcagaaactgctggcagcggctttctgtattctgccacaccaggggcagatgtttgctttgctcgacaacataacacttctgacaataacaaccagtgtttgctgggagccaatgggaatattttgttgcaccttaaccctcagaaaccaggggctattgataatcagccattagtaactcaagaaccagtaaaggctacatcattaacactagaaggaggacgattaaaacgaactccacagctgattcatggaagagactatgaaatggtcccagaacctgtgtggagagcactttatcactggtatggagcaaacctggccttacctagaccagttatcaagaacagcaagacagacatcccagagctggaattatttccccgctatcttctcttcctgagacagcagcctgccactcggacacagcagtctaacatctgggtgaatatgggaaatgtaccttctccgaatgcacctttaaagcgggtattagcctatacaggctgttttagtcgaatgcagaccatcaaggaaattcacgaatatctatctcaaaggctgcgcattaaagaggaagatatgcgcctgtggctatacaacagtgagaactaccttactcttctggatgatgaggatcataaattggaatatttgaaaatccaggatgaacaacacctggtaattgaagttcgcaacaaagatatgagttggcctgaggagatgtcttttatagcaaatagtagtaaaatagatagacacaaggttcccacagaaaagggagccacaggtctaagcaatctgggaaacacatgcttcatgaactcaagcatccagtgtgttagtaacacacagccactgacacagtattttatctcagggagacatctttatgaactcaacaggacaaatcccattggtatgaaggggcatatggctaaatgctatggtgatttagtgcaggaactttggagtggaactcagaagaatgttgccccattaaagcttcggtggaccatagcaaaatatgctcccaggtttaatgggtttcagcaacaggactcccaagaacttctggcttttctcttggatggtcttcatgaagatcttaatcgagtccatgaaaagccatatgtggaactgaaggacagtgatgggcgaccagactgggaagtagctgcagaggcctgggacaaccatctaagaagaaatagatcaattgttgtggatttgttccatgggcagctaagatctcaagtaaaatgcaagacatgtgggcatataagtgtccgatttgaccctttcaattttttgtctttgccactaccaatggacagttatatgcacttagaaataacagtgattaagttagatggtactacccctgtacggtatggactaagactgaatatggatgaaaagtacacaggtttaaaaaaacagctgagtgatctctgtggacttaattcagaacaaatccttctagcagaagtacatggttccaacataaagaactttcctcaggacaaccaaaaagtacgactctcagtgagtggatttttgtgtgcatttgaaattcctgtccctgtgtctccaatttcagcttctagtccaacacagacagatttctcctcttcgccatctacaaatgaaatgttcaccctaactaccaatggggacctaccccgaccaatattcatccccaatggaatgccaaacactgttgtgccatgtggaactgagaagaacttcacaaatggaatggttaatggtcacatgccatctcttcctgacagcccctttacaggttacatcattgcagtccaccgaaaaatgatgaggacagaactgtatttcctgtcatctcagaagaatcgccccagcctctttggaatgccattgattgttccatgtactgtgcatacccggaagaaagacctatatgatgcggtttggattcaagtatcccggttagcgagcccactcccacctcaggaagctagtaatcatgcccaggattgtgacgacagtatgggctatcaatatccattcactctacgagttgtgcagaaagatgggaactcctgtgcttggtgcccatggtatagattttgcagaggctgtaaaattgattgtggggaagacagagctttcattggaaatgcctatatcgctgtggattgggatcccacagcccttcaccttcgctatcaaacatcccaggaaagggttgtagatgagcatgagagtgtggagcagagtcggcgagcgcaagccgagcccatcaacctggacagctgtctccgtgctttcaccagtgaggaagagctaggggaaaatgagatgtactactgttccaagtgtaagacccactgcttagcaacaaagaagctggatctctggaggcttccacccatcctgattattcaccttaagcgatttcaatttgtaaatggtcggtggataaaatcacagaaaattgtcaaatttcctcgggaaagttttgatccaagtgcttttttggtaccaagagacccggctctctgccagcataaaccactcacaccccagggggatgagctctctgagcccaggattctggcaagggaggtgaagaaagtggatgcgcagagttcggctggggaagaggacgtgctcctgagcaaaagcccatcctcactcagcgctaacatcatcagcagcccgaaaggttctccttcttcatcaagaaaaagtggaaccagctgtccctccagcaaaaacagcagccctaatagcagcccacggactttggggaggagcaaagggaggctccggctgccccagattggcagcaaaaataaactgtcaagtagtaaagagaacttggatgccagcaaagaaaatggggctgggcagatatgtgagctggctgacgccttgagtcgagggcatgtgctggggggcagccaaccagagttggtcactcctcaggaccatgaggtagctttggccaatggattcctttatgagcatgaagcatgtggcaatggctacagcaatggtcagcttggaaaccacagtgaagaagacagcactgatgaccaaagagaagatactcgtattaagcctatttataatctatatgcaatttcgtgccattcaggaattctgggtgggggccattacgtcacttatgccaaaaacccaaactgcaagtggtactgttacaatgacagcagctgtaaggaacttcacccggatgaaattgacaccgactctgcctacattcttttctatgagcagcaggggatagactatgcacaatttctgccaaagactgatggcaaaaagatggcagacacaagcagtatggatgaagactttgagtctgattacaaaaagtactgtgtgttacagtaaagctaccactctggctgctagacagcttggcggtgagggagatgactccttgtagctgacatttggcaaaagcgtcactgaaaggcaagctaaatgtagttattttatcctgtggccctgaagcacaaaataaaaattctaattaaaatagttaactttaagagtagtaatcattttattttgaagtctcatacaagctctccgatagagaactttcaggcagatcccaccattagcctgtaaacaaaaggtttggcaccagccacctgggaccaaataagaattcaattgtgcttgtccagatatgaacaaatatgtagtgagtatagagtttaccataatcataacaaatattaaagatttccttggagtcagagtaaaaaacaaacaattataatgttgtctagggacgacatgatatgctacctcctttttcctgaagttttattccattatattgacaagatggagaaagcaagatcacgaaggtgtgcaaatgattcttaaggcatggacgaggatttttcaatttattttttaaactgtttccataccctttctttgtctttcttgctttttgtttttgccgttgtatttatgtttgagacacaaccagtcattggtggcaggggcatatagtggtcagtctgaaagggaggctctcttaagagctgtgtgccttccacccagagccttgtgggagacccagtagaaagaaacagcatcctgggaaatccagctaccatggccctcccagtggaggcatcttacatttaggatacttcaagtatcctcagaaatgtattctgcacccccggccccacccatgctgagggaaggggagcagttgccaatatttgcaccatcttcacatgcacctgttgcaacaagagcttctgggaaggtaagtggcattggagctagatcacgtttcacaattagtggttgttcttttctgtgtttgtcttgcactttaaaaaagagagaacacatgcaaatgaacttgcttgtgtgtatttgatggctctaagggctataaattacaaacaaaacacatcccagacattaggagttcataagtgtatttaatgaaattggtggttttaggaagtcaactttagttttgctttgtttgcatgtccactaatttttttattttgatatttgtcttttttttaaattttacagtagtcatcgaaagttatgtttctttgcttacttcatttttttctctaatcaagactggaacaaaagtataaatattatttatttcaggtagcatttttttcgtgtagttttttaatatatacttgaaggaaatgtttcaccttatttttggtctttgtttattcatttagaccctgcaagttgattctcattaattgtcagattccactaccctttcttcctcatagatagtaattaccaatgtaactaagtatttgtgttctgatatctgaggccagtaactattaatatctagttctcagagcatttggaaaggttatcttaaatggctacctaaattgaaatccttttcagaaaaaatataattgcaagtaggtaggactggcctaaattgtctaatgtaataaagtcagacaaaatgcatactttatagtttcaagattttcagtatataaaatctgtccattcccattaaaaagtggaagattttaaataatttctttacagatgttttatttaagcaggtagctcaatctactaatgttgtttgatctgtgtttgttatactggttgtaattaatttttttaattcatgaactagcagaaaatttattaaattaactattaactacattcaccttgtaaattactgtataaaacttgttgacaatgcactgactttagaaagatgttaatgtacataaatagagtgtaaataaaatagtgttgatgtaccg

SEQ ID NO: 837 - DNA, 6737 bp, Homo sapiens; identical to SEQ ID NO: 836
  misc_feature (56)..(56): second gene starts at position 56

SEQ ID NO: 838 - DNA, 32765 bp, Homo sapiens
  misc_feature (409)..(409): second gene starts at position 409
atgccgaggctgaaggagtctcgctcccacgagtccctgctcagccccagcagtgcggtggaggcgctggacctcagcatggaggaagaggtggtcatcaagcccgtgcacagcagcatccttggccaggactactgcttcgaggtgacgacgtcatcaggaagcaagtgcttttcctgccggtctgcagctgagcgggataagtggatggagaacctccggcgagcggtgcatcccaacaaggacaacagccggcgtgtggagcacatcctgaagctgtgggtgatcgaggccaaggacctgccagccaagaagaagtacctgtgcgagctgtgcctggacgatgtgctctatgcccgcaccacgggcaagctcaagacggacaatgttttctggggcgagcacttcgagttccacaacttgccgcctctgcgcacggtcactgtccacctgtaccgggagaccgacaagaagaagaagaaggagcgcaacagttacctgggcctggtgagcctacctgctgcctcggtggccgggcggcagttcgtggagaagtggtacccggtggtgacgcccaaccccaagggcggcaagggccctggacccatgatccgcatcaaggcgcgctaccaaaccatcaccatcctgcccatggagatgtacaaagagttcgctgagcacatcaccaaccactacctggggctgtgtgcagccctcgagcccatcctcagtgccaagaccaaggaggagatggcatctgccctggtgcacatcctgcagagcacgggcaaggtgaaggacttcctgacagacctgatgatgtcagaggtggaccgctgcggggacaacgagcacctcatcttccgggagaacacactggccaccaaggccattgaggagtacctcaagctagtgggccagaagtacctgcaggacgccctaggtgagttcatcaaagcgctgtatgagtcagatgagaactgcgaagtggatcccagcaagtgctcggccgctgacctcccagagcaccagggcaacctcaagatgtgctgcgagctggccttctgcaagatcatcaactcctactgtgtcttcccacgggagttgaaagaggtgtttgcctcgtggaggcaggagtgcagcagtcgcggccgcccggacatcagtgagcggctcatcagcgcctccctcttcctgcgcttcctctgcccagccatcatgtcgccctcactcttcaacctgctgcaggagtaccctgatgaccgcactgcccgcaccctcaccctcatcgccaaggtcacccagaacctggccaactttgccaaatttggcagcaaggaggaatacatgtccttcatgaaccagttcctagagcatgagtggaccaacatgcagcgcttcctgctggagatctccaaccccgagaccctctccaatacagccggcttcgagggctacatcgacctgggccgcgagctctccagcctgcactcactgctctgggaggccgtcagccagctggagcagagcatagtatccaaactgggacccctgcctcggatcctgagggacgtccacacagcactgagcaccccaggtagcgggcagctcccagggaccaatgacctggcctccacaccgggctctggcagcagcagcatctcagctgggctgcagaagatggtgattgagaacgatctttccggtctgatagatttcacccggttaccgtctccaacccccgaaaacaaggacttgttttttgtcacaaggtcctccggggtccagccctcacctgcccgcagctcgagttactcggaagccaacgagcctgatcttcagatggccaacggtggcaagagcctctccatggtggacctccaggacgcccgcacgctggatggggaggcaggctccccggcgggccccgacgtcctccccacagatgggcaggccgctgcagctcagctggtggccgggtggccggcccgggcaaccccagtgaacctggcagggctggccacggtgcggcgggcaggccagacaccaaccacaccaggcacctccgagggcgcgccaggccggccccagctgttggcaccgctctccttccagaaccctgtgtaccagatggcggctggcctgccgctgtcaccccgtggccttggcgactcaggctctgagggccacagctccctgagctcacacagcaacagcgaggagttggcggctgctgccaagctgggaagtttcagcactgccgcggaggagctggctcggcggcccggtgagctggcacggcgacagatgtcactgactgaaaaaggcgggcagcccacggtgccacggcagaacagtgctggcccccagaggaggatcgaccagcctccgcccccacccccgccgccgtggagctggtggtggctttgggctcggtggcggagctggctttggaggtggcttcggtggccctggctttcctgtctgccctcctggaggtatccaagaggtcactgtcaaccagagtctcctgactcccctcaacctgcaaatcgaccccagcatccagagggtgaggaccgaggagcgcgagcagatcaagaccctcaacaataagtttgcctccttcatcgacaaggtgcggttcctggagcagcagaacaaggttctggacaccaagtggaccctgctgcaggagcagggcaccaagactgtgaggcagaacctggagccgttgttcgagcagtacatcaacaacctcaggaggcagctggacagcatcgtgggggaacggggccgcctggactcagagctgagaaacatgcaggacctggtggaagacttcaagaacaagtatgaggatgaaatcaacaagcgtaccactgctgagaatgagtttgtgatgctgaagaaggatgtagatgctgcctacatgaacaaggtggagctggaggccaaggttgatgcactgatggatgagattaacttcatgaagatgttctttgatgcggagctgtcccagatgcagacgcatgtctctgacacctcagtggtcctctccatggacaacaaccgcaacctggacctggatagcatcatcgctgaggtcaaggcccagtatgaggagattgccaaccgcagccggacagaagccgagtcctggtatcagaccaagtatgaggagctgcagcagacagctggccggcatggcgatgacctccgcaacaccaagcatgagatctctgagatgaaccggatgatccagaggctgagagccgagattgacaatgtcaagaaacagtgcgccaatctgcagaacgccattgcggatgccgagcagcgtggggagctggccctcaaggatgccaggaacaagctggccgagctggaggaggccctgcagaaggccaagcaggacatggcccggctgctgcgtgagtaccaggagctcatgaacaccaagctggccctggacgtggagatcgccacttaccgcaagctgctggagggcgaggaatgcagactcagtggagaaggagttggaccagtcaacatctctgttgtcacaagcagtgtttcctctggatatggcagtggcagtggctatggcggtggcctcggtggaggtcttggcggcggcctcggtggaggtcttgccggaggtagcagtggaagctactactccagcagcagtgggggtgtcggcctaggtggtgggctcagtgtggggggctctggcttcagtgcaagcagtggccgagggctgggggtgggctttggcagtggcgggggtagcagctccagcgtcaaatttgtctccaccacctcctcctcccggaagagcttcaagagctaagaacctgctgcaagtcactgccttccaagtgcagcaacccagcccatggagattgcctcttctaggcagttgctcaagccatgttttatccttttctggagagtagtctagaccaagccaattgcagaaccacattctttggttcccaggagagccccattcccagcccctggtctcccgtgccgcagttctatattctgcttcaaatcagccttcaggtttcccacagcatggcccctgctgacacgagaacccaaagttttcccaaatctaaatcatcaaaacagaatccccaccccaatcccaaattttgttttggttctaactacctccagaatgtgttcaataaaatgcttttataatataatcgacagctctctcgcccagcccagttctggaagggataaaaagggggcatcaccgttcctgggtaacagagccaccttctgcgtcctgctgagctctgttctctccagcacctcccaacccactagtgcctggttctcttgctccaccaggaacaagccaccatgtctcgccagtcaagtgtgtccttccggagcgggggcagtcgtagcttcagcaccgcctctgccatcaccccgtctgtctcccgcaccagcttcacctccgtgtcccggtccgggggtggcggtggtggtggcttcggcagggtcagccttgcgggtgcttgtggagtgggtggctatggcagccggagcctctacaacctggggggctccaagaggatatccatcagcactagtggtggcagcttcaggaaccggtttggtgctggtgctggaggcggctatggctttggaggtggtgccggtagtggatttggtttcggcggtggagctggtggtggctttgggctcggtggcggagctggctttggaggtggcttcggtggccctggctttcctgtctgccctcctggaggtatccaagaggtcactgtcaaccagagtctcctgactcccctcaacctgcaaatcgaccccagcatccagagggtgaggaccgaggagcgcgagcagatcaagaccctcaacaataagtttgcctccttcatcgacaaggtgcggttcctggagcagcagaacaaggttctggacaccaagtggaccctgctgcaggagcagggcaccaagactgtgaggcagaacctggagccgttgttcgagcagtacatcaacaacctcaggaggcagctggacagcatcgtgggggaacggggccgcctggactcagagctgagaaacatgcaggacctggtggaagacttcaagaacaagtatgaggatgaaatcaacaagcgtaccactgctgagaatgagtttgtgatgctgaagaaggatgtagatgctgcctacatgaacaaggtggagctggaggccaaggttgatgcactgatggatgagattaacttcatgaagatgttctttgatgcggagctgtcccagatgcagacgcatgtctctgacacctcagtggtcctctccatggacaacaaccgcaacctggacctggatagcatcatcgctgaggtcaaggcccagtatgaggagattgccaaccgcagccggacagaagccgagtcctggtatcagaccaagtatgaggagctgcagcagacagctggccggcatggcgatgacctccgcaacaccaagcatgagatctctgagatgaaccggatgatccagaggctgagagccgagattgacaatgtcaagaaacagtgcgccaatctgcagaacgccattgcggatgccgagcagcgtggggagctggccctcaaggatgccaggaacaagctggccgagctggaggaggccctgcagaaggccaagcaggacatggcccggctgctgcgtgagtaccaggagctcatgaacaccaagctggccctggacgtggagatcgccacttaccgcaagctgctggagggcgaggaatgcagactcagtggagaaggagttggaccagtcaacatctctgttgtcacaagcagtgtttcctctggatatggcagtggcagtggctatggcggtggcctcggtggaggtcttggcggcggcctcggtggaggtcttgccggaggtagcagtggaagctactactccagcagcagtgggggtgtcggcctaggtggtgggctcagtgtggggggctctggcttcagtgcaagcagtggccgagggctgggggtgggctttggcagtggcgggggtagcagctccagcgtcaaatttgtctccaccacctcctcctcccggaagagcttcaagagctaagaacctgctgcaagtcactgccttccaagtgcagcaacccagcccatggagattgcctcttctaggcagttgctcaagccatgttttatccttttctggagagtagtctagaccaagccaattgcagaaccacattctttggttcccaggagagccccattcccagcccctggtctcccgtgccgcagttctatattctgcttcaaatcagccttcaggtttcccacagcatggcccctgctgacacgagaacccaaagttttcccaaatctaaatcatcaaaacagaatccccaccccaatcccaaattttgttttggttctaactacctccagaatgtgttcaataaaatgcttttataatataatcgacagctctctcgcccagcccagttctggaagggataaaaagggggcatcaccgttcctgggtaacagagccaccttctgcgtcctgctgagctctgttctctccagcacctcccaacccactagtgcctggttctcttgctccaccaggaacaagccaccatgtctcgccagtcaagtgtgtccttccggagcgggggcagtcgtagcttcagcaccgcctctgccatcaccccgtctgtctcccgcaccagcttcacctccgtgtcccggtccgggggtggcggtggtggtggcttcggcagggtcagccttgcgggtgcttgtggagtgggtggctatggcagccggagcctctacaacctggggggctccaagaggatatccatcagcactagtggtggcagcttcaggaaccggtttggtgctggtgctggaggcggctatggctttggaggtggtgccggtagtggatttggtttcggcggtggagctggtggtggctttgggctcggtggcggagctggctttggaggtggcttcggtggccctggctttcctgtctgccctcctggaggtatccaagaggtcactgtcaaccagagtctcctgactcccctcaacctgcaaatcgaccccagcatccagagggtgaggaccgaggagcgcgagcagatcaagaccctcaacaataagtttgcctccttcatcgacaaggtgcggttcctggagcagcagaacaaggttctggacaccaagtggaccctgctgcaggagcagggcaccaagactgtgaggcagaacctggagccgttgttcgagcagtacatcaacaacctcaggaggcagctggacagcatcgtgggggaacggggccgcctggactcagagctgagaaacatgcaggacctggtggaagacttcaagaacaagtatgaggatgaaatcaacaagcgtaccactgctgagaatgagtttgtgatgctgaagaaggatgtagatgctgcctacatgaacaaggtggagctggaggccaaggttgatgcactgatggatgagattaacttcatgaagatgttctttgatgcggagctgtcccagatgcagacgcatgtctctgacacctcagtggtcctctccatggacaacaaccgcaacctggacctggatagcatcatcgctgaggtcaaggcccagtatgaggagattgccaaccgcagccggacagaagccgagtcctggtatcagaccaagtatgaggagctgcagcagacagctggccggcatggcgatgacctccgcaacaccaagcatgagatctctgagatgaaccggatgatccagaggctgagagccgagattgacaatgtcaagaaacagtgcgccaatctgcagaacgccattgcggatgccgagcagcgtggggagctggccctcaaggatgccaggaacaagctggccgagctggaggaggccctgcagaaggccaagcaggacatggcccggctgctgcgtgagtaccaggagctcatgaacaccaagctggccctggacgtggagatcgccacttaccgcaagctgctggagggcgaggaatgcagactcagtggagaaggagttggaccagtcaacatctctgttgtcacaagcagtgtttcctctggatatggcagtggcagtggctatggcggtggcctcggtggaggtcttggcggcggcctcggtggaggtcttgccggaggtagcagtggaagctactactccagcagcagtgggggtgtcggcctaggtggtgggctcagtgtggggggctctggcttcagtgcaagcagtggccgagggctgggggtgggctttggcagtggcgggggtagcagctccagcgtcaaatttgtctccaccacctcctcctcccggaagagcttcaagagctaagaacctgctgcaagtcactgccttccaagtgcagcaacccagcccatggagattgcctcttctaggcagttgctcaagccatgttttatccttttctggagagtagtctagaccaagccaattgcagaaccacattctttggttcccaggagagccccattcccagcccctggtctcccgtgccgcagttctatattctgcttcaaatcagccttcaggtttcccacagcatggcccctgctgacacgagaacccaaagttttcccaaatctaaatcatcaaaacagaatccccaccccaatcccaaattttgttttggttctaactacctccagaatgtgttcaataaaatgcttttataatataatcgacagctctctcgcccagcccagttctggaagggataaaaagggggcatcaccgttcctgggtaacagagccaccttctgcgtcctgctgagctctgttctctccagcacctcccaacccactagtgcctggttctcttgctccaccaggaacaagccaccatgtctcgccagtcaagtgtgtccttccggagcgggggcagtcgtagcttcagcaccgcctctgccatcaccccgtctgtctcccgcaccagcttcacctccgtgtcccggtccgggggtggcggtggtggtggcttcggcagggtcagccttgcgggtgcttgtggagtgggtggctatggcagccggagcctctacaacctggggggctccaagaggatatccatcagcactagtggtggcagcttcaggaaccggtttggtgctggtgctggaggcggctatggctttggaggtggtgccggtagtggatttggtttcggcggtggagctggtggtggctttgggctcggtggcggagctggctttggaggtggcttcggtggccctggctttcctgtctgccctcctggaggtatccaagaggtcactgtcaaccagagtctcctgactcccctcaacctgcaaatcgaccccagcatccagagggtgaggaccgaggagcgcgagcagatcaagaccctcaacaataagtttgcctccttcatcgacaaggtgcggttcctggagcagcagaacaaggttctggacaccaagtggaccctgctgcaggagcagggcaccaagactgtgaggcagaacctggagccgttgttcgagcagtacatcaacaacctcaggaggcagctggacagcatcgtgggggaacggggccgcctggactcagagctgagaaacatgcaggacctggtggaagacttcaagaacaagtatgaggatgaaatcaacaagcgtaccactgctgagaatgagtttgtgatgctgaagaaggatgtagatgctgcctacatgaacaaggtggagctggaggccaaggttgatgcactgatggatgagattaacttcatgaagatgttctttgatgcggagctgtcccagatgcagacgcatgtctctgacacctcagtggtcctctccatggacaacaaccgcaacctggacctggatagcatcatcgctgaggtcaaggcccagtatgaggagattgccaaccgcagccggacagaagccgagtcctggtatcagaccaagtatgaggagctgcagcagacagctggccggcatggcgatgacctccgcaacaccaagcatgagatctctgagatgaaccggatgatccagaggctgagagccgagattgacaatgtcaagaaacagtgcgccaatctgcagaacgccattgcggatgccgagcagcgtggggagctggccctcaaggatgccaggaacaagctggccgagctggaggaggccctgcagaaggccaagcaggacatggcccggctgctgcgtgagtaccaggagctcatgaacaccaagctggccctggacgtggagatcgccacttaccgcaagctgctggagggcgaggaatgcagactcagtggagaaggagttggaccagtcaacatctctgttgtcacaagcagtgtttcctctggatatggcagtggcagtggctatggcggtggcctcggtggaggtcttggcggcggcctcggtggaggtcttgccggaggtagcagtggaagctactactccagcagcagtgggggtgtcggcctaggtggtgggctcagtgtggggggctctggcttcagtgcaagcagtggccgagggctgggggtgggctttggcagtggcgggggtagcagctccagcgtcaaatttgtctccaccacctcctcctcccggaagagcttcaagagctaagaacctgctgcaagtcactgccttccaagtgcagcaacccagcccatggagattgcctcttctaggcagttgctcaagccatgttttatccttttctggagagtagtctagaccaagccaattgcagaaccacattctttggttcccaggagagccccattcccagcccctggtctcccgtgccgcagttctatattctgcttcaaatcagccttcaggtttcccacagcatggcccctgctgacacgagaacccaaagttttcccaaatctaaatcatcaaaacagaatccccaccccaatcccaaattttgttttggttctaactacctccagaatgtgttcaataaaatgcttttataatataatcgacagctctctcgcccagcccagttctggaagggataaaaagggggcatcaccgttcctgggtaacagagccaccttctgcgtcctgctgagctctgttctctccagcacctcccaacccactagtgcctggttctcttgctccaccaggaacaagccaccatgtctcgccagtcaagtgtgtccttccggagcgggggcagtcgtagcttcagcaccgcctctgccatcaccccgtctgtctcccgcaccagcttcacctccgtgtcccggtccgggggtggcggtggtggtggcttcggcagggtcagccttgcgggtgcttgtggagtgggtggctatggcagccggagcctctacaacctggggggctccaagaggatatccatcagcactagtggtggcagcttcaggaaccggtttggtgctggtgctggaggcggctatggctttggaggtggtgccggtagtggatttggtttcggcggtggagctggtggtggctttgggctcggtggcggagctggctttggaggtggcttcggtggccctggctttcctgtctgccctcctggaggtatccaagaggtcactgtcaaccagagtctcctgactcccctcaacctgcaaatcgaccccagcatccagagggtgaggaccgaggagcgcgagcagatcaagaccctcaacaataagtttgcctccttcatcgacaaggtgcggttcctggagcagcagaacaaggttctggacaccaagtggaccctgctgcaggagcagggcaccaagactgtgaggcagaacctggagccgttgttcgagcagtacatcaacaacctcaggaggcagctggacagcatcgtgggggaacggggccgcctggactcagagctgagaaacatgcaggacctggtggaagacttcaagaacaagtatgaggatgaaatcaacaagcgtaccactgctgagaatgagtttgtgatgctgaagaaggatgtagatgctgcctacatgaacaaggtggagctggaggccaaggttgatgcactgatggatgagattaacttcatgaagatgttctttgatgcggagctgtcccagatgcagacgcatgtctctgacacctcagtggtcctctccatggacaacaaccgcaacctggacctggatagcatcatcgctgaggtcaaggcccagtatgaggagattgccaaccgcagccggacagaagccgagtcctggtatcagaccaagtatgaggagctgcagcagacagctggccggcatggcgatgacctccgcaacaccaagcatgagatctctgagatgaaccggatgatccagaggctgagagccgagattgacaatgtcaagaaacagtgcgccaatctgcagaacgccattgcggatgccgagcagcgtggggagctggccctcaaggatgccaggaacaagctggccgagctggaggaggccctgcagaaggccaagcaggacatggcccggctgctgcgtgagtaccaggagctcatgaacaccaagctggccctggacgtggagatcgccacttaccgcaagctgctggagggcgaggaatgcagactcagtggagaaggagttggaccagtcaacatctctgttgtcacaagcagtgtttcctctggatatggcagtggcagtggctatggcggtggcctcggtggaggtcttggcggcggcctcggtggaggtcttgccggaggtagcagtggaagctactactccagcagcagtgggggtgtcggcctaggtggtgggctcagtgtggggggctctggcttcagtgcaagcagtggccgagggctgggggtgggctttggcagtggcgggggtagcagctccagcgtcaaatttgtctccaccacctcctcctcccggaagagcttcaagagctaagaacctgctgcaagtcactgccttccaagtgcagcaacccagcccatggagattgcctcttctaggcagttgctcaagccatgttttatccttttctggagagtagtctagaccaagccaattgcagaaccacattctttggttcccaggagagccccattcccagcccctggtctcccgtgccgcagttctatattctgcttcaaatcagccttcaggtttcccacagcatggcccctgctgacacgagaacccaaagttttcccaaatctaaatcatcaaaacagaatccccaccccaatcccaaattttgttttggttctaactacctccagaatgtgttcaataaaatgcttttataatataatcgacagctctctcgcccagcccagttctggaagggataaaaagggggcatcaccgttcctgggtaacagagccaccttctgcgtcctgctgagctctgttctctccagcacctcccaacccactagtgcctggttctcttgctccaccaggaacaagccaccatgtctcgccagtcaagtgtgtccttccggagcgggggcagtcgtagcttcagcaccgcctctgccatcaccccgtctgtctcccgcaccagcttcacctccgtgtcccggtccgggggtggcggtggtggtggcttcggcagggtcagccttgcgggtgcttgtggagtgggtggctatggcagccggagcctctacaacctggggggctccaagaggatatccatcagcactagtggtggcagcttcaggaaccggtttggtgctggtgctggaggcggctatggctttggaggtggtgccggtagtggatttggtttcggcggtggagctggtggtggctttgggctcggtggcggagctggctttggaggtggcttcggtggccctggctttcctgtctgccctcctggaggtatccaagaggtcactgtcaaccagagtctcctgactcccctcaacctgcaaatcgaccccagcatccagagggtgaggaccgaggagcgcgagcagatcaagaccctcaacaataagtttgcctccttcatcgacaaggtgcggttcctggagcagcagaacaaggttctggacaccaagtggaccctgctgcaggagcagggcaccaagactgtgaggcagaacctggagccgttgttcgagcagtacatcaacaacctcaggaggcagctggacagcatcgtgggggaacggggccgcctggactcagagctgagaaacatgcaggacctggtggaagacttcaagaacaagtatgaggatgaaatcaacaagcgtaccactgctgagaatgagtttgtgatgctgaagaaggatgtagatgctgcctacatgaacaaggtggagctggaggccaaggttgatgcactgatggatgagattaacttcatgaagatgttctttgatgcggagctgtcccagatgcagacgcatgtctctgacacctcagtggtcctctccatggacaacaaccgcaacctggacctggatagcatcatcgctgaggtcaaggcccagtatgaggagattgccaaccgcagccggacagaagccgagtcctggtatcagaccaagtatgaggagctgcagcagacagctggccggcatggcgatgacctccgcaacaccaagcatgagatctctgagatgaaccggatgatccagaggctgagagccgagattgacaatgtcaagaaacagtgcgccaatctgcagaacgccattgcggatgccgagcagcgtggggagctggccctcaaggatgccaggaacaagctggccgagctggaggaggccctgcagaaggccaagcaggacatggcccggctgctgcgtgagtaccaggagctcatgaacaccaagctggccctggacgtggagatcgccacttaccgcaagctgctggagggcgaggaatgcagactcagtggagaaggagttggaccagtcaacatctctgttgtcacaagcagtgtttcctctggatatggcagtggcagtggctatggcggtggcctcggtggaggtcttggcggcggcctcggtggaggtcttgccggaggtagcagtggaagctactactccagcagcagtgggggtgtcggcctaggtggtgggctcagtgtggggggctctggcttcagtgcaagcagtggccgagggctgggggtgggctttggcagtggcgggggtagcagctccagcgtcaaatttgtctccaccacctcctcctcccggaagagcttcaagagctaagaacctgctgcaagtcactgccttccaagtgcagcaacccagcccatggagattgcctcttctaggcagttgctcaagccatgttttatccttttctggagagtagtctagaccaagccaattgcagaaccacattctttggttcccaggagagccccattcccagcccctggtctcccgtgccgcagttctatattctgcttcaaatcagccttcaggtttcccacagcatggcccctgctgacacgagaacccaaagttttcccaaatctaaatcatcaaaacagaatccccaccccaatcccaaattttgttttggttctaactacctccagaatgtgttcaataaaatgcttttataatataatcgacagctctctcgcccagcccagttctggaagggataaaaagggggcatcaccgttcctgggtaacagagccaccttctgcgtcctgctgagctctgttctctccagcacctcccaacccactagtgcctggttctcttgctccaccaggaacaagccaccatgtctcgccagtcaagtgtgtccttccggagcgggggcagtcgtagcttcagcaccgcctctgccatcaccccgtctgtctcccgcaccagcttcacctccgtgtcccggtccgggggtggcggtggtggtggcttcggcagggtcagccttgcgggtgcttgtggagtgggtggctatggcagccggagcctctacaacctggggggctccaagaggatatccatcagcactagtggtggcagcttcaggaaccggtttggtgctggtgctggaggcggctatggctttggaggtggtgccggtagtggatttggtttcggcggtggagctggtggtggctttgggctcggtggcggagctggctttggaggtggcttcggtggccctggctttcctgtctgccctcctggaggtatccaagaggtcactgtcaaccagagtctcctgactcccctcaacctgcaaatcgaccccagcatccagagggtgaggaccgaggagcgcgagcagatcaagaccctcaacaataagtttgcctccttcatcgacaaggtgcggttcctggagcagcagaacaaggttctggacaccaagtggaccctgctgcaggagcagggcaccaagactgtgaggcagaacctggagccgttgttcgagcagtacatcaacaacctcaggaggcagctggacagcatcgtgggggaacggggccgcctggactcagagctgagaaacatgcaggacctggtggaagacttcaagaacaagtatgaggatgaaatcaacaagcgtaccactgctgagaatgagtttgtgatgctgaagaaggatgtagatgctgcctacatgaacaaggtggagctggaggccaaggttgatgcactgatggatgagattaacttcatgaagatgttctttgatgcggagctgtcccagatgcagacgcatgtctctgacacctcagtggtcctctccatggacaacaaccgcaacctggacctggatagcatcatcgctgaggtcaaggcccagtatgaggagattgccaaccgcagccggacagaagccgagtcctggtatcagaccaagtatgaggagctgcagcagacagctggccggcatggcgatgacctccgcaacaccaagcatgagatctctgagatgaaccggatgatccagaggctgagagccgagattgacaatgtcaagaaacagtgcgccaatctgcagaacgccattgcggatgccgagcagcgtggggagctggccctcaaggatgccaggaacaagctggccgagctggaggaggccctgcagaaggccaagcaggacatggcccggctgctgcgtgagtaccaggagctcatgaacaccaagctggccctggacgtggagatcgccacttaccgcaagctgctggagggcgaggaatgcagactcagtggagaaggagttggaccagtcaacatctctgttgtcacaagcagtgtttcctctggatatggcagtggcagtggctatggcggtggcctcggtggaggtcttggcggcggcctcggtggaggtcttgccggaggtagcagtggaagctactactccagcagcagtgggggtgtcggcctaggtggtgggctcagtgtggggggctctggcttcagtgcaagcagtggccgagggctgggggtgggctttggcagtggcgggggtagcagctccagcgtcaaatttgtctccaccacctcctcctcccggaagagcttcaagagctaagaacctgctgcaagtcactgccttccaagtgcagcaacccagcccatggagattgcctcttctaggcagttgctcaagccatgttttatccttttctggagagtagtctagaccaagccaattgcagaaccacattctttggttcccaggagagccccattcccagcccctggtctcccgtgccgcagttctatattctgcttcaaatcagccttcaggtttcccacagcatggcccctgctgacacgagaacccaaagttttcccaaatctaaatcatcaaaacagaatccccaccccaatcccaaattttgttttggttctaactacctccagaatgtgttcaataaaatgcttttataatataatcgacagctctctcgcccagcccagttctggaagggataaaaagggggcatcaccgttcctgggtaacagagccaccttctgcgtcctgctgagctctgttctctccagcacctcccaacccactagtgcctggttctcttgctccaccaggaacaagccaccatgtctcgccagtcaagtgtgtccttccggagcgggggcagtcgtagcttcagcaccgcctctgccatcaccccgtctgtctcccgcaccagcttcacctccgtgtcccggtccgggggtggcggtggtggtggcttcggcagggtcagccttgcgggtgcttgtggagtgggtggctatggcagccggagcctctacaacctggggggctccaagaggatatccatcagcactagtggtggcagcttcaggaaccggtttggtgctggtgctggaggcggctatggctttggaggtggtgccggtagtggatttggtttcggcggtggagctggtggtggctttgggctcggtggcggagctggctttggaggtggcttcggtggccctggctttcctgtctgccctcctggaggtatccaagaggtcactgtcaaccagagtctcctgactcccctcaacctgcaaatcgaccccagcatccagagggtgaggaccgaggagcgcgagcagatcaagaccctcaacaataagtttgcctccttcatcgacaaggtgcggttcctggagcagcagaacaaggttctggacaccaagtggaccctgctgcaggagcagggcaccaagactgtgaggcagaacctggagccgttgttcgagcagtacatcaacaacctcaggaggcagctggacagcatcgtgggggaacggggccgcctggactcagagctgagaaacatgcaggacctggtggaagacttcaagaacaagtatgaggatgaaatcaacaagcgtaccactgctgagaatgagtttgtgatgctgaagaaggatgtagatgctgcctacatgaacaaggtggagctggaggccaaggttgatgcactgatggatgagattaacttcatgaagatgttctttgatgcggagctgtcccagatgcagacgcatgtctctgacacctcagtggtcctctccatggacaacaaccgcaacctggacctggatagcatcatcgctgaggtcaaggcccagtatgaggagattgccaaccgcagccggacagaagccgagtcctggtatcagaccaagtatgaggagctgcagcagacagctggccggcatggcgatgacctccgcaacaccaagcatgagatctctgagatgaaccggatgatccagaggctgagagccgagattgacaatgtcaagaaacagtgcgccaatctgcagaacgccattgcggatgccgagcagcgtggggagctggccctcaaggatgccaggaacaagctggccgagctggaggaggccctgcagaaggccaagcaggacatggcccggctgctgcgtgagtaccaggagctcatgaacaccaagctggccctggacgtggagatcgccacttaccgcaagctgctggagggcgaggaatgcagactcagtggagaaggagttggaccagtcaacatctctgttgtcacaagcagtgtttcctctggatatggcagtggcagtggctatggcggtggcctcggtggaggtcttggcggcggcctcggtggaggtcttgccggaggtagcagtggaagctactactccagcagcagtgggggtgtcggcctaggtggtgggctcagtgtggggggctctggcttcagtgcaagcagtggccgagggctgggggtgggctttggcagtggcgggggtagcagctccagcgtcaaatttgtctccaccacctcctcctcccggaagagcttcaagagctaagaacctgctgcaagtcactgccttccaagtgcagcaacccagcccatggagattgcctcttctaggcagttgctcaagccatgttttatccttttctggagagtagtctagaccaagccaattgcagaaccacattctttggttcccaggagagccccattcccagcccctggtctcccgtgccgcagttctatattctgcttcaaatcagccttcaggtttcccacagcatggcccctgctgacacgagaacccaaagttttcccaaatctaaatcatcaaaacagaatccccaccccaatcccaaattttgttttggttctaactacctccagaatgtgttcaataaaatgcttttataatataatcgacagctctctcgcccagcccagttctggaagggataaaaagggggcatcaccgttcctgggtaacagagccaccttctgcgtcctgctgagctctgttctctccagcacctcccaacccactagtgcctggttctcttgctccaccaggaacaagccaccatgtctcgccagtcaagtgtgtccttccggagcgggggcagtcgtagcttcagcaccgcctctgccatcaccccgtctgtctcccgcaccagcttcacctccgtgtcccggtccgggggtggcggtggtggtggcttcggcagggtcagccttgcgggtgcttgtggagtgggtggctatggcagccggagcctctacaacctggggggctccaagaggatatccatcagcactagtggtggcagcttcaggaaccggtttggtgctggtgctggaggcggctatggctttggaggtggtgccggtagtggatttggtttcggcggtggagctggtggtggctttgggctcggtggcggagctggctttggaggtggcttcggtggccctggctttcctgtctgccctcctggaggtatccaagaggtcactgtcaaccagagtctcctgactcccctcaacctgcaaatcgaccccagcatccagagggtgaggaccgaggagcgcgagcagatcaagaccctcaacaataagtttgcctccttcatcgacaaggtgcggttcctggagcagcagaacaaggttctggacaccaagtggaccctgctgcaggagcagggcaccaagactgtgaggcagaacctggagccgttgttcgagcagtacatcaacaacctcaggaggcagctggacagcatcgtgggggaacggggccgcctggactcagagctgagaaacatgcaggacctggtggaagacttcaagaacaagtatgaggatgaaatcaacaagcgtaccactgctgagaatgagtttgtgatgctgaagaaggatgtagatgctgcctacatgaacaaggtggagctggaggccaaggttgatgcactgatggatgagattaacttcatgaagatgttctttgatgcggagctgtcccagatgcagacgcatgtctctgacacctcagtggtcctctccatggacaacaaccgcaacctggacctggatagcatcatcgctgaggtcaaggcccagtatgaggagattgccaaccgcagccggacagaagccgagtcctggtatcagaccaagtatgaggagctgcagcagacagctggccggcatggcgatgacctccgcaacaccaagcatgagatctctgagatgaaccggatgatccagaggctgagagccgagattgacaatgtcaagaaacagtgcgccaatctgcagaacgccattgcggatgccgagcagcgtggggagctggccctcaaggatgccaggaacaagctggccgagctggaggaggccctgcagaaggccaagcaggacatggcccggctgctgcgtgagtaccaggagctcatgaacaccaagctggccctggacgtggagatcgccacttaccgcaagctgctggagggcgaggaatgcagactcagtggagaaggagttggaccagtcaacatctctgttgtcacaagcagtgtttcctctggatatggcagtggcagtggctatggcggtggcctcggtggaggtcttggcggcggcctcggtggaggtcttgccggaggtagcagtggaagctactactccagcagcagtgggggtgtcggcctaggtggtgggctcagtgtggggggctctggcttcagtgcaagcagtggccgagggctgggggtgggctttggcagtggcgggggtagcagctccagcgtcaaatttgtctccaccacctcctcctcccggaagagcttcaagagctaagaacctgctgcaagtcactgccttccaagtgcagcaacccagcccatggagattgcctcttctaggcagttgctcaagccatgttttatccttttctggagagtagtctagaccaagccaattgcagaaccacattctttggttcccaggagagccccattcccagcccctggtctcccgtgccgcagttctatattctgcttcaaatcagccttcaggtttcccacagcatggcccctgctgacacgagaacccaaagttttcccaaatctaaatcatcaaaacagaatccccaccccaatcccaaattttgttttggttctaactacctccagaatgtgttcaataaaatgcttttataatataatcgacagctctctcgcccagcccagttctggaagggataaaaagggggcatcaccgttcctgggtaacagagccaccttctgcgtcctgctgagctctgttctctccagcacctcccaacccactagtgcctggttctcttgctccaccaggaacaagccaccatgtctcgccagtcaagtgtgtccttccggagcgggggcagtcgtagcttcagcaccgcctctgccatcaccccgtctgtctcccgcaccagcttcacctccgtgtcccggtccgggggtggcggtggtggtggcttcggcagggtcagccttgcgggtgcttgtggagtgggtggctatggcagccggagcctctacaacctggggggctccaagaggatatccatcagcactagtggtggcagcttcaggaaccggtttggtgctggtgctggaggcggctatggctttggaggtggtgccggtagtggatttggtttcggcggtggagctggtggtggctttgggctcggtggcggagctggctttggaggtggcttcggtggccctggctttcctgtctgccctcctggaggtatccaagaggtcactgtcaaccagagtctcctgactcccctcaacctgcaaatcgaccccagcatccagagggtgaggaccgaggagcgcgagcagatcaagaccctcaacaataagtttgcctccttcatcgacaaggtgcggttcctggagcagcagaacaaggttctggacaccaagtggaccctgctgcaggagcagggcaccaagactgtgaggcagaacctggagccgttgttcgagcagtacatcaacaacctcaggaggcagctggacagcatcgtgggggaacggggccgcctggactcagagctgagaaacatgcaggacctggtggaagacttcaagaacaagtatgaggatgaaatcaacaagcgtaccactgctgagaatgagtttgtgatgctgaagaaggatgtagatgctgcctacatgaacaaggtggagctggaggccaaggttgatgcactgatggatgagattaacttcatgaagatgttctttgatgcggagctgtcccagatgcagacgcatgtctctgacacctcagtggtcctctccatggacaacaaccgcaacctggacctggatagcatcatcgctgaggtcaaggcccagtatgaggagattgccaaccgcagccggacagaagccgagtcctggtatcagaccaagtatgaggagctgcagcagacagctggccggcatggcgatgacctccgcaacaccaagcatgagatctctgagatgaaccggatgatccagaggctgagagccgagattgacaatgtcaagaaacagtgcgccaatctgcagaacgccattgcggatgccgagcagcgtggggagctggccctcaaggatgccaggaacaagctggccgagctggaggaggccctgcagaaggccaagcaggacatggcccggctgctgcgtgagtaccaggagctcatgaacaccaagctggccctggacgtggagatcgccacttaccgcaagctgctggagggcgaggaatgcagactcagtggagaaggagttggaccagtcaacatctctgttgtcacaagcagtgtttcctctggatatggcagtggcagtggctatggcggtggcctcggtggaggtcttggcggcggcctcggtggaggtcttgccggaggtagcagtggaagctactactccagcagcagtgggggtgtcggcctaggtggtgggctcagtgtggggggctctggcttcagtgcaagcagtggccgagggctgggggtgggctttggcagtggcgggggtagcagctccagcgtcaaatttgtctccaccacctcctcctcccggaagagcttcaagagctaagaacctgctgcaagtcactgccttccaagtgcagcaacccagcccatggagattgcctcttctaggcagttgctcaagccatgttttatccttttctggagagtagtctagaccaagccaattgcagaaccacattctttggttcccaggagagccccattcccagcccctggtctcccgtgccgcagttctatattctgcttcaaatcagccttcaggtttcccacagcatggcccctgctgacacgagaacccaaagttttcccaaatctaaatcatcaaaacagaatccccaccccaatcccaaattttgttttggttctaactacctccagaatgtgttcaataaaatgcttttataatataatcgacagctctctcgcccagcccagttctggaagggataaaaagggggcatcaccgttcctgggtaacagagccaccttctgcgtcctgctgagctctgttctctccagcacctcccaacccactagtgcctggttctcttgctccaccaggaacaagccaccatgtctcgccagtcaagtgtgtccttccggagcgggggcagtcgtagcttcagcaccgcctctgccatcaccccgtctgtctcccgcaccagcttcacctccgtgtcccggtccgggggtggcggtggtggtggcttcggcagggtcagccttgcgggtgcttgtggagtgggtggctatggcagccggagcctctacaacctggggggctccaagaggatatccatcagcactagtggtggcagcttcaggaaccggtttggtgctggtgctggaggcggctatggctttggaggtggtgccggtagtggatttggtttcggcggtggagctggtggtggctttgggctcggtggcggagctggctttggaggtggcttcggtggccctggctttcctgtctgccctcctggaggtatccaagaggtcactgtcaaccagagtctcctgactcccctcaacctgcaaatcgaccccagcatccagagggtgaggaccgaggagcgcgagcagatcaagaccctcaacaataagtttgcctccttcatcgacaaggtgcggttcctggagcagcagaacaaggttctggacaccaagtggaccctgctgcaggagcagggcaccaagactgtgaggcagaacctggagccgttgttcgagcagtacatcaacaacctcaggaggcagctggacagcatcgtgggggaacggggccgcctggactcagagctgagaaacatgcaggacctggtggaagacttcaagaacaagtatgaggatgaaatcaacaagcgtaccactgctgagaatgagtttgtgatgctgaagaaggatgtagatgctgcctacatgaacaaggtggagctggaggccaaggttgatgcactgatggatgagattaacttcatgaagatgttctttgatgcggagctgtcccagatgcagacgcatgtctctgacacctcagtggtcctctccatggacaacaaccgcaacctggacctggatagcatcatcgctgaggtcaaggcccagtatgaggagattgccaaccgcagccggacagaagccgagtcctggtatcagaccaagtatgaggagctgcagcagacagctggccggcatggcgatgacctccgcaacaccaagcatgagatctctgagatgaaccggatgatccagaggctgagagccgagattgacaatgtcaagaaacagtgcgccaatctgcagaacgccattgcggatgccgagcagcgtggggagctggccctcaaggatgccaggaacaagctggccgagctggaggaggccctgcagaaggccaagcaggacatggcccggctgctgcgtgagtaccaggagctcatgaacaccaagctggccctggacgtggagatcgccacttaccgcaagctgctggagggcgaggaatgcagactcagtggagaaggagttggaccagtcaacatctctgttgtcacaagcagtgtttcctctggatatggcagtggcagtggctatggcggtggcctcggtggaggtcttggcggcggcctcggtggaggtcttgccggaggtagcagtggaagctactactccagcagcagtgggggtgtcggcctaggtggtgggctcagtgtggggggctctggcttcagtgcaagcagtggccgagggctgggggtgggctttggcagtggcgggggtagcagctccagcgtcaaatttgtctccaccacctcctcctcccggaagagcttcaagagctaagaacctgctgcaagtcactgccttccaagtgcagcaacccagcccatggagattgcctcttctaggcagttgctcaagccatgttttatccttttctggagagtagtctagaccaagccaattgcagaaccacattctttggttcccaggagagccccattcccagcccctggtctcccgtgccgcagttctatattctgcttcaaatcagccttcaggtttcccacagcatggcccctgctgacacgagaacccaaagttttcccaaatctaaatcatcaaaacagaatccccaccccaatcccaaattttgttttggttctaactacctccagaatgtgttcaataaaatgcttttataatataatcgacagctctctcgcccagcccagttctggaagggataaaaagggggcatcaccgttcctgggtaacagagccaccttctgcgtcctgctgagctctgttctctccagcacctcccaacccactagtgcctggttctcttgctccaccaggaacaagccaccatgtctcgccagtcaagtgtgtccttccggagcgggggcagtcgtagcttcagcaccgcctctgccatcaccccgtctgtctcccgcaccagcttcacctccgtgtcccggtccgggggtggcggtggtggtggcttcggcagggtcagccttgcgggtgcttgtggagtgggtggctatggcagccggagcctctacaacctggggggctccaagaggatatccatcagcactagtggtggcagcttcaggaaccggtttggtgctggtgctggaggcggctatggctttggaggtggtgccggtagtggatttggtttcggcggtggagctggtggtggctttgggctcggtggcggagctggctttggaggtggcttcggtggccctggctttcctgtctgccctcctggaggtatccaagaggtcactgtcaaccagagtctcctgactcccctcaacctgcaaatcgaccccagcatccagagggtgaggaccgaggagcgcgagcagatcaagaccctcaacaataagtttgcctccttcatcgacaaggtgcggttcctggagcagcagaacaaggttctggacaccaagtggaccctgctgcaggagcagggcaccaagactgtgaggcagaacctggagccgttgttcgagcagtacatcaacaacctcaggaggcagctggacagcatcgtgggggaacggggccgcctggactcagagctgagaaacatgcaggacctggtggaagacttcaagaacaagtatgaggatgaaatcaacaagcgtaccactgctgagaatgagtttgtgatgctgaagaaggatgtagatgctgcctacatgaacaaggtggagctggaggccaaggttgatgcactgatggatgagattaacttcatgaagatgttctttgatgcggagctgtcccagatgcagacgcatgtctctgacacctcagtggtcctctccatggacaacaaccgcaacctggacctggatagcatcatcgctgaggtcaaggcccagtatgaggagattgccaaccgcagccggacagaagccgagtcctggtatcagaccaagtatgaggagctgcagcagacagctggccggcatggcgatgacctccgcaacaccaagcatgagatctctgagatgaaccggatgatccagaggctgagagccgagattgacaatgtcaagaaacagtgcgccaatctgcagaacgccattgcggatgccgagcagcgtggggagctggccctcaaggatgccaggaacaagctggccgagctggaggaggccctgcagaaggccaagcaggacatggcccggctgctgcgtgagtaccaggagctcatgaacaccaagctggccctggacgtggagatcgccacttaccgcaagctgctggagggcgaggaatgcagactcagtggagaaggagttggaccagtcaacatctctgttgtcacaagcagtgtttcctctggatatggcagtggcagtggctatggcggtggcctcggtggaggtcttggcggcggcctcggtggaggtcttgccggaggtagcagtggaagctactactccagcagcagtgggggtgtcggcctaggtggtgggctcagtgtggggggctctggcttcagtgcaagcagtggccgagggctgggggtgggctttggcagtggcgggggtagcagctccagcgtcaaatttgtctccaccacctcctcctcccggaagagcttcaagagctaagaacctgctgcaagtcactgccttccaagtgcagcaacccagcccatggagattgcctcttctaggcagttgctcaagccatgttttatccttttctggagagtagtctagaccaagccaattgcagaaccacattctttggttcccaggagagccccattcccagcccctggtctcccgtgccgcagttctatattctgcttcaaatcagccttcaggtttcccacagcatggcccctgctgacacgagaacccaaagttttcccaaatctaaatcatcaaaacagaatccccaccccaatcccaaattttgttttggttctaactacctccagaatgtgttcaataaaatgcttttataatataatcgacagctctctcgcccagcccagttctggaagggataaaaagggggcatcaccgttcctgggtaacagagccaccttctgcgtcctgctgagctctgttctctccagcacctcccaacccactagtgcctggttctcttgctccaccaggaacaagccaccatgtctcgccagtcaagtgtgtccttccggagcgggggcagtcgtagcttcagcaccgcctctgccatcaccccgtctgtctcccgcaccagcttcacctccgtgtcccggtccgggggtggcggtggtggtggcttcggcagggtcagccttgcgggtgcttgtggagtgggtggctatggcagccggagcctctacaacctggggggctccaagaggatatccatcagcactagtggtggcagcttcaggaaccggtttggtgctggtgctggaggcggctatggctttggaggtggtgccggtagtggatttggtttcggcggtggagctggtggtggctttgggctcggtggcggagctggctttggaggtggcttcggtggccctggctttcctgtctgccctcctggaggtatccaagaggtcactgtcaaccagagtctcctgactcccctcaacctgcaaatcgaccccagcatccagagggtgaggaccgaggagcgcgagcagatcaagaccctcaacaataagtttgcctccttcatcgacaaggtgcggttcctggagcagcagaacaaggttctggacaccaagtggaccctgctgcaggagcagggcaccaagactgtgaggcagaacctggagccgttgttcgagcagtacatcaacaacctcaggaggcagctggacagcatcgtgggggaacggggccgcctggactcagagctgagaaacatgcaggacctggtggaagacttcaagaacaagtatgaggatgaaatcaacaagcgtaccactgctgagaatgagtttgtgatgctgaagaaggatgtagatgctgcctacatgaacaaggtggagctggaggccaaggttgatgcactgatggatgagattaacttcatgaagatgttctttgatgcggagctgtcccagatgcagacgcatgtctctgacacctcagtggtcctctccatggacaacaaccgcaacctggacctggatagcatcatcgctgaggtcaaggcccagtatgaggagattgccaaccgcagccggacagaagccgagtcctggtatcagaccaagtatgaggagctgcagcagacagctggccggcatggcgatgacctccgcaacaccaagcatgagatctctgagatgaaccggatgatccagaggctgagagccgagattgacaatgtcaagaaacagtgcgccaatctgcagaacgccattgcggatgccgagcagcgtggggagctggccctcaaggatgccaggaacaagctggccgagctggaggaggccctgcagaaggccaagcaggacatggcccggctgctgcgtgagtaccaggagctcatgaacaccaagctggccctggacgtggagatcgccacttaccgcaagctgctggagggcgaggaatgcagactcagtggagaaggagttggaccagtcaacatctctgttgtcacaagcagtgtttcctctggatatggcagtggcagtggctatggcggtggcctcggtggaggtcttggcggcggcctcggtggaggtcttgccggaggtagcagtggaagctactactccagcagcagtgggggtgtcggcctaggtggtgggctcagtgtggggggctctggcttcagtgcaagcagtggccgagggctgggggtgggctttggcagtggcgggggtagcagctccagcgtcaaatttgtctccaccacctcctcctcccggaagagcttcaagagctaagaacctgctgcaagtcactgccttccaagtgcagcaacccagcccatggagattgcctcttctaggcagttgctcaagccatgttttatccttttctggagagtagtctagaccaagccaattgcagaaccacattctttggttcccaggagagccccattcccagcccctggtctcccgtgccgcagttctatattctgcttcaaatcagccttcaggtttcccacagcatggcccctgctgacacgagaacccaaagttttcccaaatctaaatcatcaaaacagaatccccaccccaatcccaaattttgttttggttctaactacctccagaatgtgttcaataaaatgcttttataatataatcgacagctctctcgcccagcccagttctggaagggataaaaagggggcatcaccgttcctgggtaacagagccaccttctgcgtcctgctgagctctgttctctccagcacctcccaacccactagtgcctggttctcttgctccaccaggaacaagccaccatgtctcgccagtcaagtgtgtccttccggagcgggggcagtcgtagcttcagcaccgcctctgccatcaccccgtctgtctcccgcaccagcttcacctccgtgtcccggtccgggggtggcggtggtggtggcttcggcagggtcagccttgcgggtgcttgtggagtgggtggctatggcagccggagcctctacaacctggggggctccaagaggatatccatcagcactagtggtggcagcttcaggaaccggtttggtgctggtgctggaggcggctatggctttggaggtggtgccggtagtggatttggtttcggcggtggagctggtggtggctttgggctcggtggcggagctggctttggaggtggcttcggtggccctggctttcctgtctgccctcctggaggtatccaagaggtcactgtcaaccagagtctcctgactcccctcaacctgcaaatcgaccccagcatccagagggtgaggaccgaggagcgcgagcagatcaagaccctcaacaataagtttgcctccttcatcgacaaggtgcggttcctggagcagcagaacaaggttctggacaccaagtggaccctgctgcaggagcagggcaccaagactgtgaggcagaacctggagccgttgttcgagcagtacatcaacaacctcaggaggcagctggacagcatcgtgggggaacggggccgcctggactcagagctgagaaacatgca

SEQ ID NO: 839 - DNA, 32765 bp, Homo sapiens
  misc_feature (697)..(697): second gene starts at position 697
atggagcccgactcccttctggaccaagacgactcctacgagtcgcctcaagaaaggccgggctctcggcgcagcctgcctggcagcctttccgagaagagccccagcatggagccctcggccgccacgccgttccgggtcacgggcttcctcagccgccgcctcaagggctccatcaagcgcaccaagagccagcccaagctggaccgcaaccacagcttccgccacatcctgccggggttccggagcgccgccgccgccgccgcggacaatgagaggtcccatctgatgccgaggctgaaggagtctcgctcccacgagtccctgctcagccccagcagtgcggtggaggcgctggacctcagcatggaggaagaggtggtcatcaagcccgtgcacagcagcatccttggccaggactactgcttcgaggtgacgacgtcatcaggaagcaagtgcttttcctgccggtctgcagctgagcgggataagtggatggagaacctccggcgagcggtgcatcccaacaaggacaacagccggcgtgtggagcacatcctgaagctgtgggtgatcgaggccaaggacctgccagccaagaagaagtacctgtgcgagctgtgcctggacgatgtgctctatgcccgcaccacgggcaagctcaagacggacaatgttttctggggcgagcacttcgagttccacaacttgccgcctctgcgcacggtcactgtccacctgtaccgggagaccgacaagaagaagaagaaggagcgcaacagttacctgggcctggtgagcctacctgctgcctcggtggccgggcggcagttcgtggagaagtggtacccggtggtgacgcccaaccccaagggcggcaagggccctggacccatgatccgcatcaaggcgcgctaccaaaccatcaccatcctgcccatggagatgtacaaagagttcgctgagcacatcaccaaccactacctggggctgtgtgcagccctcgagcccatcctcagtgccaagaccaaggaggagatggcatctgccctggtgcacatcctgcagagcacgggcaaggtgaaggacttcctgacagacctgatgatgtcagaggtggaccgctgcggggacaacgagcacctcatcttccgggagaacacactggccaccaaggccattgaggagtacctcaagctagtgggccagaagtacctgcaggacgccctaggtgagttcatcaaagcgctgtatgagtcagatgagaactgcgaagtggatcccagcaagtgctcggccgctgacctcccagagcaccagggcaacctcaagatgtgctgcgagctggccttctgcaagatcatcaactcctactgtgtcttcccacgggagttgaaagaggtgtttgcctcgtggaggcaggagtgcagcagtcgcggccgcccggacatcagtgagcggctcatcagcgcctccctcttcctgcgcttcctctgcccagccatcatgtcgccctcactcttcaacctgctgcaggagtaccctgatgaccgcactgcccgcaccctcaccctcatcgccaaggtcacccagaacctggccaactttgccaaatttggcagcaaggaggaatacatgtccttcatgaaccagttcctagagcatgagtggaccaacatgcagcgcttcctgctggagatctccaaccccgagaccctctccaatacagccggcttcgagggctacatcgacctgggccgcgagctctccagcctgcactcactgctctgggaggccgtcagccagctggagcagagcatagtatccaaactgggacccctgcctcggatcctgagggacgtccacacagcactgagcaccccaggtagcgggcagctcccagggaccaatgacctggcctccacaccgggctctggcagcagcagcatctcagctgggctgcagaagatggtgattgagaacgatctttccggtctgatagatttcacccggttaccgtctccaacccccgaaaacaaggacttgttttttgtcacaaggtcctccggggtccagccctcacctgcccgcagctcgagttactcggaagccaacgagcctgatcttcagatggccaacggtggcaagagcctctccatggtggacctccaggacgcccgcacgctggatggggaggcaggctccccggcgggccccgacgtcctccccacagatgggcaggccgctgcagctcagctggtggccgggtggccggcccgggcaaccccagtgaacctggcagggctggccacggtgcggcgggcaggccagacaccaaccacaccaggcacctccgagggcgcgccaggccggccccagctgttggcaccgctctccttccagaaccctgtgtaccagatggcggctggcctgccgctgtcaccccgtggccttggcgactcaggctctgagggccacagctccctgagctcacacagcaacagcgaggagttggcggctgctgccaagctgggaagtttcagcactgccgcggaggagctggctcggcggcccggtgagctggcacggcgacagatgtcactgactgaaaaaggcgggcagcccacggtgccacggcagaacagtgctggcccccagaggaggatcgaccagcctccgcccccacccccgccgccgtggagctggtggtggctttgggctcggtggcggagctggctttggaggtggcttcggtggccctggctttcctgtctgccctcctggaggtatccaagaggtcactgtcaaccagagtctcctgactcccctcaacctgcaaatcgaccccagcatccagagggtgaggaccgaggagcgcgagcagatcaagaccctcaacaataagtttgcctccttcatcgacaaggtgcggttcctggagcagcagaacaaggttctggacaccaagtggaccctgctgcaggagcagggcaccaagactgtgaggcagaacctggagccgttgttcgagcagtacatcaacaacctcaggaggcagctggacagcatcgtgggggaacggggccgcctggactcagagctgagaaacatgcaggacctggtggaagacttcaagaacaagtatgaggatgaaatcaacaagcgtaccactgctgagaatgagtttgtgatgctgaagaaggatgtagatgctgcctacatgaacaaggtggagctggaggccaaggttgatgcactgatggatgagattaacttcatgaagatgttctttgatgcggagctgtcccagatgcagacgcatgtctctgacacctcagtggtcctctccatggacaacaaccgcaacctggacctggatagcatcatcgctgaggtcaaggcccagtatgaggagattgccaaccgcagccggacagaagccgagtcctggtatcagaccaagtatgaggagctgcagcagacagctggccggcatggcgatgacctccgcaacaccaagcatgagatctctgagatgaaccggatgatccagaggctgagagccgagattgacaatgtcaagaaacagtgcgccaatctgcagaacgccattgcggatgccgagcagcgtggggagctggccctcaaggatgccaggaacaagctggccgagctggaggaggccctgcagaaggccaagcaggacatggcccggctgctgcgtgagtaccaggagctcatgaacaccaagctggccctggacgtggagatcgccacttaccgcaagctgctggagggcgaggaatgcagactcagtggagaaggagttggaccagtcaacatctctgttgtcacaagcagtgtttcctctggatatggcagtggcagtggctatggcggtggcctcggtggaggtcttggcggcggcctcggtggaggtcttgccggaggtagcagtggaagctactactccagcagcagtgggggtgtcggcctaggtggtgggctcagtgtggggggctctggcttcagtgcaagcagtggccgagggctgggggtgggctttggcagtggcgggggtagcagctccagcgtcaaatttgtctccaccacctcctcctcccggaagagcttcaagagctaagaacctgctgcaagtcactgccttccaagtgcagcaacccagcccatggagattgcctcttctaggcagttgctcaagccatgttttatccttttctggagagtagtctagaccaagccaattgcagaaccacattctttggttcccaggagagccccattcccagcccctggtctcccgtgccgcagttctatattctgcttcaaatcagccttcaggtttcccacagcatggcccctgctgacacgagaacccaaagttttcccaaatctaaatcatcaaaacagaatccccaccccaatcccaaattttgttttggttctaactacctccagaatgtgttcaataaaatgcttttataatataatcgacagctctctcgcccagcccagttctggaagggataaaaagggggcatcaccgttcctgggtaacagagccaccttctgcgtcctgctgagctctgttctctccagcacctcccaacccactagtgcctggttctcttgctccaccaggaacaagccaccatgtctcgccagtcaagtgtgtccttccggagcgggggcagtcgtagcttcagcaccgcctctgccatcaccccgtctgtctcccgcaccagcttcacctccgtgtcccggtccgggggtggcggtggtggtggcttcggcagggtcagccttgcgggtgcttgtggagtgggtggctatggcagccggagcctctacaacctggggggctccaagaggatatccatcagcactagtggtggcagcttcaggaaccggtttggtgctggtgctggaggcggctatggctttggaggtggtgccggtagtggatttggtttcggcggtggagctggtggtggctttgggctcggtggcggagctggctttggaggtggcttcggtggccctggctttcctgtctgccctcctggaggtatccaagaggtcactgtcaaccagagtctcctgactcccctcaacctgcaaatcgaccccagcatccagagggtgaggaccgaggagcgcgagcagatcaagaccctcaacaataagtttgcctccttcatcgacaaggtgcggttcctggagcagcagaacaaggttctggacaccaagtggaccctgctgcaggagcagggcaccaagactgtgaggcagaacctggagccgttgttcgagcagtacatcaacaacctcaggaggcagctggacagcatcgtgggggaacggggccgcctggactcagagctgagaaacatgcaggacctggtggaagacttcaagaacaagtatgaggatgaaatcaacaagcgtaccactgctgagaatgagtttgtgatgctgaagaaggatgtagatgctgcctacatgaacaaggtggagctggaggccaaggttgatgcactgatggatgagattaacttcatgaagatgttctttgatgcggagctgtcccagatgcagacgcatgtctctgacacctcagtggtcctctccatggacaacaaccgcaacctggacctggatagcatcatcgctgaggtcaaggcccagtatgaggagattgccaaccgcagccggacagaagccgagtcctggtatcagaccaagtatgaggagctgcagcagacagctggccggcatggcgatgacctccgcaacaccaagcatgagatctctgagatgaaccggatgatccagaggctgagagccgagattgacaatgtcaagaaacagtgcgccaatctgcagaacgccattgcggatgccgagcagcgtggggagctggccctcaaggatgccaggaacaagctggccgagctggaggaggccctgcagaaggccaagcaggacatggcccggctgctgcgtgagtaccaggagctcatgaacaccaagctggccctggacgtggagatcgccacttaccgcaagctgctggagggcgaggaatgcagactcagtggagaaggagttggaccagtcaacatctctgttgtcacaagcagtgtttcctctggatatggcagtggcagtggctatggcggtggcctcggtggaggtcttggcggcggcctcggtggaggtcttgccggaggtagcagtggaagctactactccagcagcagtgggggtgtcggcctaggtggtgggctcagtgtggggggctctggcttcagtgcaagcagtggccgagggctgggggtgggctttggcagtggcgggggtagcagctccagcgtcaaatttgtctccaccacctcctcctcccggaagagcttcaagagctaagaacctgctgcaagtcactgccttccaagtgcagcaacccagcccatggagattgcctcttctaggcagttgctcaagccatgttttatccttttctggagagtagtctagaccaagccaattgcagaaccacattctttggttcccaggagagccccattcccagcccctggtctcccgtgccgcagttctatattctgcttcaaatcagccttcaggtttcccacagcatggcccctgctgacacgagaacccaaagttttcccaaatctaaatcatcaaaacagaatccccaccccaatcccaaattttgttttggttctaactacctccagaatgtgttcaataaaatgcttttataatataatcgacagctctctcgcccagcccagttctggaagggataaaaagggggcatcaccgttcctgggtaacagagccaccttctgcgtcctgctgagctctgttctctccagcacctcccaacccactagtgcctggttctcttgctccaccaggaacaagccaccatgtctcgccagtcaagtgtgtccttccggagcgggggcagtcgtagcttcagcaccgcctctgccatcaccccgtctgtctcccgcaccagcttcacctccgtgtcccggtccgggggtggcggtggtggtggcttcggcagggtcagccttgcgggtgcttgtggagtgggtggctatggcagccggagcctctacaacctggggggctccaagaggatatccatcagcactagtggtggcagcttcaggaaccggtttggtgctggtgctggaggcggctatggctttggaggtggtgccggtagtggatttggtttcggcggtggagctggtggtggctttgggctcggtggcggagctggctttggaggtggcttcggtggccctggctttcctgtctgccctcctggaggtatccaagaggtcactgtcaaccagagtctcctgactcccctcaacctgcaaatcgaccccagcatccagagggtgaggaccgaggagcgcgagcagatcaagaccctcaacaataagtttgcctccttcatcgacaaggtgcggttcctggagcagcagaacaaggttctggacaccaagtggaccctgctgcaggagcagggcaccaagactgtgaggcagaacctggagccgttgttcgagcagtacatcaacaacctcaggaggcagctggacagcatcgtgggggaacggggccgcctggactcagagctgagaaacatgcaggacctggtggaagacttcaagaacaagtatgaggatgaaatcaacaagcgtaccactgctgagaatgagtttgtgatgctgaagaaggatgtagatgctgcctacatgaacaaggtggagctggaggccaaggttgatgcactgatggatgagattaacttcatgaagatgttctttgatgcggagctgtcccagatgcagacgcatgtctctgacacctcagtggtcctctccatggacaacaaccgcaacctggacctggatagcatcatcgctgaggtcaaggcccagtatgaggagattgccaaccgcagccggacagaagccgagtcctggtatcagaccaagtatgaggagctgcagcagacagctggccggcatggcgatgacctccgcaacaccaagcatgagatctctgagatgaaccggatgatccagaggctgagagccgagattgacaatgtcaagaaacagtgcgccaatctgcagaacgccattgcggatgccgagcagcgtggggagctggccctcaaggatgccaggaacaagctggccgagctggaggaggccctgcagaaggccaagcaggacatggcccggctgctgcgtgagtaccaggagctcatgaacaccaagctggccctggacgtggagatcgccacttaccgcaagctgctggagggcgaggaatgcagactcagtggagaaggagttggaccagtcaacatctctgttgtcacaagcagtgtttcctctggatatggcagtggcagtggctatggcggtggcctcggtggaggtcttggcggcggcctcggtggaggtcttgccggaggtagcagtggaagctactactccagcagcagtgggggtgtcggcctaggtggtgggctcagtgtggggggctctggcttcagtgcaagcagtggccgagggctgggggtgggctttggcagtggcgggggtagcagctccagcgtcaaatttgtctccaccacctcctcctcccggaagagcttcaagagctaagaacctgctgcaagtcactgccttccaagtgcagcaacccagcccatggagattgcctcttctaggcagttgctcaagccatgttttatccttttctggagagtagtctagaccaagccaattgcagaaccacattctttggttcccaggagagccccattcccagcccctggtctcccgtgccgcagttctatattctgcttcaaatcagccttcaggtttcccacagcatggcccctgctgacacgagaacccaaagttttcccaaatctaaatcatcaaaacagaatccccaccccaatcccaaattttgttttggttctaactacctccagaatgtgttcaataaaatgcttttataatataatcgacagctctctcgcccagcccagttctggaagggataaaaagggggcatcaccgttcctgggtaacagagccaccttctgcgtcctgctgagctctgttctctccagcacctcccaacccactagtgcctggttctcttgctccaccaggaacaagccaccatgtctcgccagtcaagtgtgtccttccggagcgggggcagtcgtagcttcagcaccgcctctgccatcaccccgtctgtctcccgcaccagcttcacctccgtgtcccggtccgggggtggcggtggtggtggcttcggcagggtcagccttgcgggtgcttgtggagtgggtggctatggcagccggagcctctacaacctggggggctccaagaggatatccatcagcactagtggtggcagcttcaggaaccggtttggtgctggtgctggaggcggctatggctttggaggtggtgccggtagtggatttggtttcggcggtggagctggtggtggctttgggctcggtggcggagctggctttggaggtggcttcggtggccctggctttcctgtctgccctcctggaggtatccaagaggtcactgtcaaccagagtctcctgactcccctcaacctgcaaatcgaccccagcatccagagggtgaggaccgaggagcgcgagcagatcaagaccctcaacaataagtttgcctccttcatcgacaaggtgcggttcctggagcagcagaacaaggttctggacaccaagtggaccctgctgcaggagcagggcaccaagactgtgaggcagaacctggagccgttgttcgagcagtacatcaacaacctcaggaggcagctggacagcatcgtgggggaacggggccgcctggactcagagctgagaaacatgcaggacctggtggaagacttcaagaacaagtatgaggatgaaatcaacaagcgtaccactgctgagaatgagtttgtgatgctgaagaaggatgtagatgctgcctacatgaacaaggtggagctggaggccaaggttgatgcactgatggatgagattaacttcatgaagatgttctttgatgcggagctgtcccagatgcagacgcatgtctctgacacctcagtggtcctctccatggacaacaaccgcaacctggacctggatagcatcatcgctgaggtcaaggcccagtatgaggagattgccaaccgcagccggacagaagccgagtcctggtatcagaccaagtatgaggagctgcagcagacagctggccggcatggcgatgacctccgcaacaccaagcatgagatctctgagatgaaccggatgatccagaggctgagagccgagattgacaatgtcaagaaacagtgcgccaatctgcagaacgccattgcggatgccgagcagcgtggggagctggccctcaaggatgccaggaacaagctggccgagctggaggaggccctgcagaaggccaagcaggacatggcccggctgctgcgtgagtaccaggagctcatgaacaccaagctggccctggacgtggagatcgccacttaccgcaagctgctggagggcgaggaatgcagactcagtggagaaggagttggaccagtcaacatctctgttgtcacaagcagtgtttcctctggatatggcagtggcagtggctatggcggtggcctcggtggaggtcttggcggcggcctcggtggaggtcttgccggaggtagcagtggaagctactactccagcagcagtgggggtgtcggcctaggtggtgggctcagtgtggggggctctggcttcagtgcaagcagtggccgagggctgggggtgggctttggcagtggcgggggtagcagctccagcgtcaaatttgtctccaccacctcctcctcccggaagagcttcaagagctaagaacctgctgcaagtcactgccttccaagtgcagcaacccagcccatggagattgcctcttctaggcagttgctcaagccatgttttatccttttctggagagtagtctagaccaagccaattgcagaaccacattctttggttcccaggagagccccattcccagcccctggtctcccgtgccgcagttctatattctgcttcaaatcagccttcaggtttcccacagcatggcccctgctgacacgagaacccaaagttttcccaaatctaaatcatcaaaacagaatccccaccccaatcccaaattttgttttggttctaactacctccagaatgtgttcaataaaatgcttttataatataatcgacagctctctcgcccagcccagttctggaagggataaaaagggggcatcaccgttcctgggtaacagagccaccttctgcgtcctgctgagctctgttctctccagcacctcccaacccactagtgcctggttctcttgctccaccaggaacaagccaccatgtctcgccagtcaagtgtgtccttccggagcgggggcagtcgtagcttcagcaccgcctctgccatcaccccgtctgtctcccgcaccagcttcacctccgtgtcccggtccgggggtggcggtggtggtggcttcggcagggtcagccttgcgggtgcttgtggagtgggtggctatggcagccggagcctctacaacctggggggctccaagaggatatccatcagcactagtggtggcagcttcaggaaccggtttggtgctggtgctggaggcggctatggctttggaggtggtgccggtagtggatttggtttcggcggtggagctggtggtggctttgggctcggtggcggagctggctttggaggtggcttcggtggccctggctttcctgtctgccctcctggaggtatccaagaggtcactgtcaaccagagtctcctgactcccctcaacctgcaaatcgaccccagcatccagagggtgaggaccgaggagcgcgagcagatcaagaccctcaacaataagtttgcctccttcatcgacaaggtgcggttcctggagcagcagaacaaggttctggacaccaagtggaccctgctgcaggagcagggcaccaagactgtgaggcagaacctggagccgttgttcgagcagtacatcaacaacctcaggaggcagctggacagcatcgtgggggaacggggccgcctggactcagagctgagaaacatgcaggacctggtggaagacttcaagaacaagtatgaggatgaaatcaacaagcgtaccactgctgagaatgagtttgtgatgctgaagaaggatgtagatgctgcctacatgaacaaggtggagctggaggccaaggttgatgcactgatggatgagattaacttcatgaagatgttctttgatgcggagctgtcccagatgcagacgcatgtctctgacacctcagtggtcctctccatggacaacaaccgcaacctggacctggatagcatcatcgctgaggtcaaggcccagtatgaggagattgccaaccgcagccggacagaagccgagtcctggtatcagaccaagtatgaggagctgcagcagacagctggccggcatggcgatgacctccgcaacaccaagcatgagatctctgagatgaaccggatgatccagaggctgagagccgagattgacaatgtcaagaaacagtgcgccaatctgcagaacgccattgcggatgccgagcagcgtggggagctggccctcaaggatgccaggaacaagctggccgagctggaggaggccctgcagaaggccaagcaggacatggcccggctgctgcgtgagtaccaggagctcatgaacaccaagctggccctggacgtggagatcgccacttaccgcaagctgctggagggcgaggaatgcagactcagtggagaaggagttggaccagtcaacatctctgttgtcacaagcagtgtttcctctggatatggcagtggcagtggctatggcggtggcctcggtggaggtcttggcggcggcctcggtggaggtcttgccggaggtagcagtggaagctactactccagcagcagtgggggtgtcggcctaggtggtgggctcagtgtggggggctctggcttcagtgcaagcagtggccgagggctgggggtgggctttggcagtggcgggggtagcagctccagcgtcaaatttgtctccaccacctcctcctcccggaagagcttcaagagctaagaacctgctgcaagtcactgccttccaagtgcagcaacccagcccatggagattgcctcttctaggcagttgctcaagccatgttttatccttttctggagagtagtctagaccaagccaattgcagaaccacattctttggttcccaggagagccccattcccagcccctggtctcccgtgccgcagttctatattctgcttcaaatcagccttcaggtttcccacagcatggcccctgctgacacgagaacccaaagttttcccaaatctaaatcatcaaaacagaatccccaccccaatcccaaattttgttttggttctaactacctccagaatgtgttcaataaaatgcttttataatataatcgacagctctctcgcccagcccagttctggaagggataaaaagggggcatcaccgttcctgggtaacagagccaccttctgcgtcctgctgagctctgttctctccagcacctcccaacccactagtgcctggttctcttgctccaccaggaacaagccaccatgtctcgccagtcaagtgtgtccttccggagcgggggcagtcgtagcttcagcaccgcctctgccatcaccccgtctgtctcccgcaccagcttcacctccgtgtcccggtccgggggtggcggtggtggtggcttcggcagggtcagccttgcgggtgcttgtggagtgggtggctatggcagccggagcctctacaacctggggggctccaagaggatatccatcagcactagtggtggcagcttcaggaaccggtttggtgctggtgctggaggcggctatggctttggaggtggtgccggtagtggatttggtttcggcggtggagctggtggtggctttgggctcggtggcggagctggctttggaggtggcttcggtggccctggctttcctgtctgccctcctggaggtatccaagaggtcactgtcaaccagagtctcctgactcccctcaacctgcaaatcgaccccagcatccagagggtgaggaccgaggagcgcgagcagatcaagaccctcaacaataagtttgcctccttcatcgacaaggtgcggttcctggagcagcagaacaaggttctggacaccaagtggaccctgctgcaggagcagggcaccaagactgtgaggcagaacctggagccgttgttcgagcagtacatcaacaacctcaggaggcagctggacagcatcgtgggggaacggggccgcctggactcagagctgagaaacatgcaggacctggtggaagacttcaagaacaagtatgaggatgaaatcaacaagcgtaccactgctgagaatgagtttgtgatgctgaagaaggatgtagatgctgcctacatgaacaaggtggagctggaggccaaggttgatgcactgatggatgagattaacttcatgaagatgttctttgatgcggagctgtcccagatgcagacgcatgtctctgacacctcagtggtcctctccatggacaacaaccgcaacctggacctggatagcatcatcgctgaggtcaaggcccagtatgaggagattgccaaccgcagccggacagaagccgagtcctggtatcagaccaagtatgaggagctgcagcagacagctggccggcatggcgatgacctccgcaacaccaagcatgagatctctgagatgaaccggatgatccagaggctgagagccgagattgacaatgtcaagaaacagtgcgccaatctgcagaacgccattgcggatgccgagcagcgtggggagctggccctcaaggatgccaggaacaagctggccgagctggaggaggccctgcagaaggccaagcaggacatggcccggctgctgcgtgagtaccaggagctcatgaacaccaagctggccctggacgtggagatcgccacttaccgcaagctgctggagggcgaggaatgcagactcagtggagaaggagttggaccagtcaacatctctgttgtcacaagcagtgtttcctctggatatggcagtggcagtggctatggcggtggcctcggtggaggtcttggcggcggcctcggtggaggtcttgccggaggtagcagtggaagctactactccagcagcagtgggggtgtcggcctaggtggtgggctcagtgtggggggctctggcttcagtgcaagcagtggccgagggctgggggtgggctttggcagtggcgggggtagcagctccagcgtcaaatttgtctccaccacctcctcctcccggaagagcttcaagagctaagaacctgctgcaagtcactgccttccaagtgcagcaacccagcccatggagattgcctcttctaggcagttgctcaagccatgttttatccttttctggagagtagtctagaccaagccaattgcagaaccacattctttggttcccaggagagccccattcccagcccctggtctcccgtgccgcagttctatattctgcttcaaatcagccttcaggtttcccacagcatggcccctgctgacacgagaacccaaagttttcccaaatctaaatcatcaaaacagaatccccaccccaatcccaaattttgttttggttctaactacctccagaatgtgttcaataaaatgcttttataatataatcgacagctctctcgcccagcccagttctggaagggataaaaagggggcatcaccgttcctgggtaacagagccaccttctgcgtcctgctgagctctgttctctccagcacctcccaacccactagtgcctggttctcttgctccaccaggaacaagccaccatgtctcgccagtcaagtgtgtccttccggagcgggggcagtcgtagcttcagcaccgcctctgccatcaccccgtctgtctcccgcaccagcttcacctccgtgtcccggtccgggggtggcggtggtggtggcttcggcagggtcagccttgcgggtgcttgtggagtgggtggctatggcagccggagcctctacaacctggggggctccaagaggatatccatcagcactagtggtggcagcttcaggaaccggtttggtgctggtgctggaggcggctatggctttggaggtggtgccggtagtggatttggtttcggcggtggagctggtggtggctttgggctcggtggcggagctggctttggaggtggcttcggtggccctggctttcctgtctgccctcctggaggtatccaagaggtcactgtcaaccagagtctcctgactcccctcaacctgcaaatcgaccccagcatccagagggtgaggaccgaggagcgcgagcagatcaagaccctcaacaataagtttgcctccttcatcgacaaggtgcggttcctggagcagcagaacaaggttctggacaccaagtggaccctgctgcaggagcagggcaccaagactgtgaggcagaacctggagccgttgttcgagcagtacatcaacaacctcaggaggcagctggacagcatcgtgggggaacggggccgcctggactcagagctgagaaacatgcaggacctggtggaagacttcaagaacaagtatgaggatgaaatcaacaagcgtaccactgctgagaatgagtttgtgatgctgaagaaggatgtagatgctgcctacatgaacaaggtggagctggaggccaaggttgatgcactgatggatgagattaacttcatgaagatgttctttgatgcggagctgtcccagatgcagacgcatgtctctgacacctcagtggtcctctccatggacaacaaccgcaacctggacctggatagcatcatcgctgaggtcaaggcccagtatgaggagattgccaaccgcagccggacagaagccgagtcctggtatcagaccaagtatgaggagctgcagcagacagctggccggcatggcgatgacctccgcaacaccaagcatgagatctctgagatgaaccggatgatccagaggctgagagccgagattgacaatgtcaagaaacagtgcgccaatctgcagaacgccattgcggatgccgagcagcgtggggagctggccctcaaggatgccaggaacaagctggccgagctggaggaggccctgcagaaggccaagcaggacatggcccggctgctgcgtgagtaccaggagctcatgaacaccaagctggccctggacgtggagatcgccacttaccgcaagctgctggagggcgaggaatgcagactcagtggagaaggagttggaccagtcaacatctctgttgtcacaagcagtgtttcctctggatatggcagtggcagtggctatggcggtggcctcggtggaggtcttggcggcggcctcggtggaggtcttgccggaggtagcagtggaagctactactccagcagcagtgggggtgtcggcctaggtggtgggctcagtgtggggggctctggcttcagtgcaagcagtggccgagggctgggggtgggctttggcagtggcgggggtagcagctccagcgtcaaatttgtctccaccacctcctcctcccggaagagcttcaagagctaagaacctgctgcaagtcactgccttccaagtgcagcaacccagcccatggagattgcctcttctaggcagttgctcaagccatgttttatccttttctggagagtagtctagaccaagccaattgcagaaccacattctttggttcccaggagagccccattcccagcccctggtctcccgtgccgcagttctatattctgcttcaaatcagccttcaggtttcccacagcatggcccctgctgacacgagaacccaaagttttcccaaatctaaatcatcaaaacagaatccccaccccaatcccaaattttgttttggttctaactacctccagaatgtgttcaataaaatgcttttataatataatcgacagctctctcgcccagcccagttctggaagggataaaaagggggcatcaccgttcctgggtaacagagccaccttctgcgtcctgctgagctctgttctctccagcacctcccaacccactagtgcctggttctcttgctccaccaggaacaagccaccatgtctcgccagtcaagtgtgtccttccggagcgggggcagtcgtagcttcagcaccgcctctgccatcaccccgtctgtctcccgcaccagcttcacctccgtgtcccggtccgggggtggcggtggtggtggcttcggcagggtcagccttgcgggtgcttgtggagtgggtggctatggcagccggagcctctacaacctggggggctccaagaggatatccatcagcactagtggtggcagcttcaggaaccggtttggtgctggtgctggaggcggctatggctttggaggtggtgccggtagtggatttggtttcggcggtggagctggtggtggctttgggctcggtggcggagctggctttggaggtggcttcggtggccctggctttcctgtctgccctcctggaggtatccaagaggtcactgtcaaccagagtctcctgactcccctcaacctgcaaatcgaccccagcatccagagggtgaggaccgaggagcgcgagcagatcaagaccctcaacaataagtttgcctccttcatcgacaaggtgcggttcctggagcagcagaacaaggttctggacaccaagtggaccctgctgcaggagcagggcaccaagactgtgaggcagaacctggagccgttgttcgagcagtacatcaacaacctcaggaggcagctggacagcatcgtgggggaacggggccgcctggactcagagctgagaaacatgcaggacctggtggaagacttcaagaacaagtatgaggatgaaatcaacaagcgtaccactgctgagaatgagtttgtgatgctgaagaaggatgtagatgctgcctacatgaacaaggtggagctggaggccaaggttgatgcactgatggatgagattaacttcatgaagatgttctttgatgcggagctgtcccagatgcagacgcatgtctctgacacctcagtggtcctctccatggacaacaaccgcaacctggacctggatagcatcatcgctgaggtcaaggcccagtatgaggagattgccaaccgcagccggacagaagccgagtcctggtatcagaccaagtatgaggagctgcagcagacagctggccggcatggcgatgacctccgcaacaccaagcatgagatctctgagatgaaccggatgatccagaggctgagagccgagattgacaatgtcaagaaacagtgcgccaatctgcagaacgccattgcggatgccgagcagcgtggggagctggccctcaaggatgccaggaacaagctggccgagctggaggaggccctgcagaaggccaagcaggacatggcccggctgctgcgtgagtaccaggagctcatgaacaccaagctggccctggacgtggagatcgccacttaccgcaagctgctggagggcgaggaatgcagactcagtggagaaggagttggaccagtcaacatctctgttgtcacaagcagtgtttcctctggatatggcagtggcagtggctatggcggtggcctcggtggaggtcttggcggcggcctcggtggaggtcttgccggaggtagcagtggaagctactactccagcagcagtgggggtgtcggcctaggtggtgggctcagtgtggggggctctggcttcagtgcaagcagtggccgagggctgggggtgggctttggcagtggcgggggtagcagctccagcgtcaaatttgtctccaccacctcctcctcccggaagagcttcaagagctaagaacctgctgcaagtcactgccttccaagtgcagcaacccagcccatggagattgcctcttctaggcagttgctcaagccatgttttatccttttctggagagtagtctagaccaagccaattgcagaaccacattctttggttcccaggagagccccattcccagcccctggtctcccgtgccgcagttctatattctgcttcaaatcagccttcaggtttcccacagcatggcccctgctgacacgagaacccaaagttttcccaaatctaaatcatcaaaacagaatccccaccccaatcccaaattttgttttggttctaactacctccagaatgtgttcaataaaatgcttttataatataatcgacagctctctcgcccagcccagttctggaagggataaaaagggggcatcaccgttcctgggtaacagagccaccttctgcgtcctgctgagctctgttctctccagcacctcccaacccactagtgcctggttctcttgctccaccaggaacaagccaccatgtctcgccagtcaagtgtgtccttccggagcgggggcagtcgtagcttcagcaccgcctctgccatcaccccgtctgtctcccgcaccagcttcacctccgtgtcccggtccgggggtggcggtggtggtggcttcggcagggtcagccttgcgggtgcttgtggagtgggtggctatggcagccggagcctctacaacctggggggctccaagaggatatccatcagcactagtggtggcagcttcaggaaccggtttggtgctggtgctggaggcggctatggctttggaggtggtgccggtagtggatttggtttcggcggtggagctggtggtggctttgggctcggtggcggagctggctttggaggtggcttcggtggccctggctttcctgtctgccctcctggaggtatccaagaggtcactgtcaaccagagtctcctgactcccctcaacctgcaaatcgaccccagcatccagagggtgaggaccgaggagcgcgagcagatcaagaccctcaacaataagtttgcctccttcatcgacaaggtgcggttcctggagcagcagaacaaggttctggacaccaagtggaccctgctgcaggagcagggcaccaagactgtgaggcagaacctggagccgttgttcgagcagtacatcaacaacctcaggaggcagctggacagcatcgtgggggaacggggccgcctggactcagagctgagaaacatgcaggacctggtggaagacttcaagaacaagtatgaggatgaaatcaacaagcgtaccactgctgagaatgagtttgtgatgctgaagaaggatgtagatgctgcctacatgaacaaggtggagctggaggccaaggttgatgcactgatggatgagattaacttcatgaagatgttctttgatgcggagctgtcccagatgcagacgcatgtctctgacacctcagtggtcctctccatggacaacaaccgcaacctggacctggatagcatcatcgctgaggtcaaggcccagtatgaggagattgccaaccgcagccggacagaagccgagtcctggtatcagaccaagtatgaggagctgcagcagacagctggccggcatggcgatgacctccgcaacaccaagcatgagatctctgagatgaaccggatgatccagaggctgagagccgagattgacaatgtcaagaaacagtgcgccaatctgcagaacgccattgcggatgccgagcagcgtggggagctggccctcaaggatgccaggaacaagctggccgagctggaggaggccctgcagaaggccaagcaggacatggcccggctgctgcgtgagtaccaggagctcatgaacaccaagctggccctggacgtggagatcgccacttaccgcaagctgctggagggcgaggaatgcagactcagtggagaaggagttggaccagtcaacatctctgttgtcacaagcagtgtttcctctggatatggcagtggcagtggctatggcggtggcctcggtggaggtcttggcggcggcctcggtggaggtcttgccggaggtagcagtggaagctactactccagcagcagtgggggtgtcggcctaggtggtgggctcagtgtggggggctctggcttcagtgcaagcagtggccgagggctgggggtgggctttggcagtggcgggggtagcagctccagcgtcaaatttgtctccaccacctcctcctcccggaagagcttcaagagctaagaacctgctgcaagtcactgccttccaagtgcagcaacccagcccatggagattgcctcttctaggcagttgctcaagccatgttttatccttttctggagagtagtctagaccaagccaattgcagaaccacattctttggttcccaggagagccccattcccagcccctggtctcccgtgccgcagttctatattctgcttcaaatcagccttcaggtttcccacagcatggcccctgctgacacgagaacccaaagttttcccaaatctaaatcatcaaaacagaatccccaccccaatcccaaattttgttttggttctaactacctccagaatgtgttcaataaaatgcttttataatataatcgacagctctctcgcccagcccagttctggaagggataaaaagggggcatcaccgttcctgggtaacagagccaccttctgcgtcctgctgagctctgttctctccagcacctcccaacccactagtgcctggttctcttgctccaccaggaacaagccaccatgtctcgccagtcaagtgtgtccttccggagcgggggcagtcgtagcttcagcaccgcctctgccatcaccccgtctgtctcccgcaccagcttcacctccgtgtcccggtccgggggtggcggtggtggtggcttcggcagggtcagccttgcgggtgcttgtggagtgggtggctatggcagccggagcctctacaacctggggggctccaagaggatatccatcagcactagtggtggcagcttcaggaaccggtttggtgctggtgctggaggcggctatggctttggaggtggtgccggtagtggatttggtttcggcggtggagctggtggtggctttgggctcggtggcggagctggctttggaggtggcttcggtggccctggctttcctgtctgccctcctggaggtatccaagaggtcactgtcaaccagagtctcctgactcccctcaacctgcaaatcgaccccagcatccagagggtgaggaccgaggagcgcgagcagatcaagaccctcaacaataagtttgcctccttcatcgacaaggtgcggttcctggagcagcagaacaaggttctggacaccaagtggaccctgctgcaggagcagggcaccaagactgtgaggcagaacctggagccgttgttcgagcagtacatcaacaacctcaggaggcagctggacagcatcgtgggggaacggggccgcctggactcagagctgagaaacatgcaggacctggtggaagacttcaagaacaagtatgaggatgaaatcaacaagcgtaccactgctgagaatgagtttgtgatgctgaagaaggatgtagatgctgcctacatgaacaaggtggagctggaggccaaggttgatgcactgatggatgagattaacttcatgaagatgttctttgatgcggagctgtcccagatgcagacgcatgtctctgacacctcagtggtcctctccatggacaacaaccgcaacctggacctggatagcatcatcgctgaggtcaaggcccagtatgaggagattgccaaccgcagccggacagaagccgagtcctggtatcagaccaagtatgaggagctgcagcagacagctggccggcatggcgatgacctccgcaacaccaagcatgagatctctgagatgaaccggatgatccagaggctgagagccgagattgacaatgtcaagaaacagtgcgccaatctgcagaacgccattgcggatgccgagcagcgtggggagctggccctcaaggatgccaggaacaagctggccgagctggaggaggccctgcagaaggccaagcaggacatggcccggctgctgcgtgagtaccaggagctcatgaacaccaagctggccctggacgtggagatcgccacttaccgcaagctgctggagggcgaggaatgcagactcagtggagaaggagttggaccagtcaacatctctgttgtcacaagcagtgtttcctctggatatggcagtggcagtggctatggcggtggcctcggtggaggtcttggcggcggcctcggtggaggtcttgccggaggtagcagtggaagctactactccagcagcagtgggggtgtcggcctaggtggtgggctcagtgtggggggctctggcttcagtgcaagcagtggccgagggctgggggtgggctttggcagtggcgggggtagcagctccagcgtcaaatttgtctccaccacctcctcctcccggaagagcttcaagagctaagaacctgctgcaagtcactgccttccaagtgcagcaacccagcccatggagattgcctcttctaggcagttgctcaagccatgttttatccttttctggagagtagtctagaccaagccaattgcagaaccacattctttggttcccaggagagccccattcccagcccctggtctcccgtgccgcagttctatattctgcttcaaatcagccttcaggtttcccacagcatggcccctgctgacacgagaacccaaagttttcccaaatctaaatcatcaaaacagaatccccaccccaatcccaaattttgttttggttctaactacctccagaatgtgttcaataaaatgcttttataatataatcgacagctctctcgcccagcccagttctggaagggataaaaagggggcatcaccgttcctgggtaacagagccaccttctgcgtcctgctgagctctgttctctccagcacctcccaacccactagtgcctggttctcttgctccaccaggaacaagccaccatgtctcgccagtcaagtgtgtccttccggagcgggggcagtcgtagcttcagcaccgcctctgccatcaccccgtctgtctcccgcaccagcttcacctccgtgtcccggtccgggggtggcggtggtggtggcttcggcagggtcagccttgcgggtgcttgtggagtgggtggctatggcagccggagcctctacaacctggggggctccaagaggatatccatcagcactagtggtggcagcttcaggaaccggtttggtgctggtgctggaggcggctatggctttggaggtggtgccggtagtggatttggtttcggcggtggagctggtggtggctttgggctcggtggcggagctggctttggaggtggcttcggtggccctggctttcctgtctgccctcctggaggtatccaagaggtcactgtcaaccagagtctcctgactcccctcaacctgcaaatcgaccccagcatccagagggtgaggaccgaggagcgcgagcagatcaagaccctcaacaataagtttgcctccttcatcgacaaggtgcggttcctggagcagcagaacaaggttctggacaccaagtggaccctgctgcaggagcagggcaccaagactgtgaggcagaacctggagccgttgttcgagcagtacatcaacaacctcaggaggcagctggacagcatcgtgggggaacggggccgcctggactcagagctgagaaacatgcaggacctggtggaagacttcaagaacaagtatgaggatgaaatcaacaagcgtaccactgctgagaatgagtttgtgatgctgaagaaggatgtagatgctgcctacatgaacaaggtggagctggaggccaaggttgatgcactgatggatgagattaacttcatgaagatgttctttgatgcggagctgtcccagatgcagacgcatgtctctgacacctcagtggtcctctccatggacaacaaccgcaacctggacctggatagcatcatcgctgaggtcaaggcccagtatgaggagattgccaaccgcagccggacagaagccgagtcctggtatcagaccaagtatgaggagctgcagcagacagctggccggcatggcgatgacctccgcaacaccaagcatgagatctctgagatgaaccggatgatccagaggctgagagccgagattgacaatgtcaagaaacagtgcgccaatctgcagaacgccattgcggatgccgagcagcgtggggagctggccctcaaggatgccaggaacaagctggccgagctggaggaggccctgcagaaggccaagcaggacatggcccggctgctgcgtgagtaccaggagctcatgaacaccaagctggccctggacgtggagatcgccacttaccgcaagctgctggagggcgaggaatgcagactcagtggagaaggagttggaccagtcaacatctctgttgtcacaagcagtgtttcctctggatatggcagtggcagtggctatggcggtggcctcggtggaggtcttggcggcggcctcggtggaggtcttgccggaggtagcagtggaagctactactccagcagcagtgggggtgtcggcctaggtggtgggctcagtgtggggggctctggcttcagtgcaagcagtggccgagggctgggggtgggctttggcagtggcgggggtagcagctccagcgtcaaatttgtctccaccacctcctcctcccggaagagcttcaagagctaagaacctgctgcaagtcactgccttccaagtgcagcaacccagcccatggagattgcctcttctaggcagttgctcaagccatgttttatccttttctggagagtagtctagaccaagccaattgcagaaccacattctttggttcccaggagagccccattcccagcccctggtctcccgtgccgcagttctatattctgcttcaaatcagccttcaggtttcccacagcatggcccctgctgacacgagaacccaaagttttcccaaatctaaatcatcaaaacagaatccccaccccaatcccaaattttgttttggttctaactacctccagaatgtgttcaataaaatgcttttataatataatcgacagctctctcgcccagcccagttctggaagggataaaaagggggcatcaccgttcctgggtaacagagccaccttctgcgtcctgctgagctctgttctctccagcacctcccaacccactagtgcctggttctcttgctccaccaggaacaagccaccatgtctcgccagtcaagtgtgtccttccggagcgggggcagtcgtagcttcagcaccgcctctgccatcaccccgtctgtctcccgcaccagcttcacctccgtgtcccggtccgggggtggcggtggtggtggcttcggcagggtcagccttgcgggtgcttgtggagtgggtggctatggcagccggagcctctacaacctggggggctccaagaggatatccatcagcactagtggtggcagcttcaggaaccggtttggtgctggtgctggaggcggctatggctttggaggtggtgccggtagtggatttggtttcggcggtggagctggtggtggctttgggctcggtggcggagctggctttggaggtggcttcggtggccctggctttcctgtctgccctcctggaggtatccaagaggtcactgtcaaccagagtctcctgactcccctcaacctgcaaatcgaccccagcatccagagggtgaggaccgaggagcgcgagcagatcaagaccctcaacaataagtttgcctccttcatcgacaaggtgcggttcctggagcagcagaacaaggttctggacaccaagtggaccctgctgcaggagcagggcaccaagactgtgaggcagaacctggagccgttgttcgagcagtacatcaacaacctcaggaggcagctggacagcatcgtgggggaacggggccgcctggactcagagctgagaaacatgcaggacctggtggaagacttcaagaacaagtatgaggatgaaatcaacaagcgtaccactgctgagaatgagtttgtgatgctgaagaaggatgtagatgctgcctacatgaacaaggtggagctggaggccaaggttgatgcactgatggatgagattaacttcatgaagatgttctttgatgcggagctgtcccagatgcagacgcatgtctctgacacctcagtggtcctctccatggacaacaaccgcaacctggacctggatagcatcatcgctgaggtcaaggcccagtatgaggagattgccaaccgcagccggacagaagccgagtcctggtatcagaccaagtatgaggagctgcagcagacagctggccggcatggcgatgacctccgcaacaccaagcatgagatctctgagatgaaccggatgatccagaggctgagagccgagattgacaatgtcaagaaacagtgcgccaatctgcagaacgccattgcggatgccgagcagcgtggggagctggccctcaaggatgccaggaacaagctggccgagctggaggaggccctgcagaaggccaagcaggacatggcccggctgctgcgtgagtaccaggagctcatgaacaccaagctggccctggacgtggagatcgccacttaccgcaagctgctggagggcgaggaatgcagactcagtggagaaggagttggaccagtcaacatctctgttgtcacaagcagtgtttcctctggatatggcagtggcagtggctatggcggtggcctcggtggaggtcttggcggcggcctcggtggaggtcttgccggaggtagcagtggaagctactactccagcagcagtgggggtgtcggcctaggtggtgggctcagtgtggggggctctggcttcagtgcaagcagtggccgagggctgggggtgggctttggcagtggcgggggtagcagctccagcgtcaaatttgtctccaccacctcctcctcccggaagagcttcaagagctaagaacctgctgcaagtcactgccttccaagtgcagcaacccagcccatggagattgcctcttctaggcagttgctcaagccatgttttatccttttctggagagtagtctagaccaagccaattgcagaaccacattctttggttcccaggagagccccattcccagcccctggtctcccgtgccgcagttctatattctgcttcaaatcagccttcaggtttcccacagcatggcccctgctgacacgagaacccaaagttttcccaaatctaaatcatcaaaacagaatccccaccccaatcccaaattttgttttggttctaactacctccagaatgtgttcaataaaatgcttttataatataatcgacagctctctcgcccagcccagttctggaagggataaaaagggggcatcaccgttcctgggtaacagagccaccttctgcgtcctgctgagctctgttctctccagcacctcccaacccactagtgcctggttctcttgctccaccaggaacaagccaccatgtctcgccagtcaagtgtgtccttccggagcgggggcagtcgtagcttcagcaccgcctctgccatcaccccgtctgtctcccgcaccagcttcacctccgtgtcccggtccgggggtggcggtggtggtggcttcggcagggtcagccttgcgggtgcttgtggagtgggtggctatggcagccggagcctctacaacctggggggctccaagaggatatccatcagcactagtggtggcagcttcaggaaccggtttggtgctggtgctggaggcggctatggctttggaggtggtgccggtagtggatttggtttcggcggtggagctggtggtggctttgggctcggtggcggagctggctttggaggtggcttcggtggccctggctttcctgtctgccctcctggaggtatccaagaggtcactgtcaaccagagtctcctgactcccctcaacctgcaaatcgaccccagcatccagagggtgaggaccgaggagcgcgagcagatcaagaccctcaacaataagtttgcctccttcatcgacaaggtgcggttcctggagcagcagaacaaggttctggacaccaagtggaccctgctgcaggagcagggcaccaagactgtgaggcagaacctggagccgttgttcgagcagtacatcaacaacctcaggaggcagctggacagcatcgtgggggaacggggccgcctggactcagagctgagaaacatgcaggacctggtggaagacttcaagaacaagtatgaggatgaaatcaacaagcgtaccactgctgagaatgagtttgtgatgctgaagaaggatgtagatgctgcctacatgaacaaggtggagctggaggccaaggttgatgcactgatggatgagattaacttcatgaagatgttctttgatgcggagctgtcccagatgcagacgcatgtctctgacacctcagtggtcctctccatggacaacaaccgcaacctggacctggatagcatcatcgctgaggtcaaggcccagtatgaggagattgccaaccgcagccggacagaagccgagtcctggtatcagaccaagtatgaggagctgcagcagacagctggccggcatggcgatgacctccgcaacaccaagcatgagatctctgagatgaaccggatgatccagaggctgagagccgagattgacaatgtcaagaaacagtgcgccaatctgcagaacgccattgcggatgccgagcagcgtggggagctggccctcaaggatgccaggaacaagctggccgagctggaggaggccctgcagaaggccaagcaggacatggcccggctgctgcgtgagtaccaggagctcatgaacaccaagctggccctggacgtggagatcgccacttaccgcaagctgctggagggcgaggaatgcagactcagtggagaaggagttggaccagtcaacatctctgttgtcacaagcagtgtttcctctggatatggcagtggcagtggctatggcggtggcctcggtggaggtcttggcggcggcctcggtggaggtcttgccggaggtagcagtggaagctactactccagcagcagtgggggtgtcggcctaggtggtgggctcagtgtggggggctctggcttcagtgcaagcagtggccgagggctgggggtgggctttggcagtggcgggggtagcagctccagcgtcaaatttgtctccaccacctcctcctcccggaagagcttcaagagctaagaacctgctgcaagtcactgccttccaagtgcagcaacccagcccatggagattgcctcttctaggcagttgctcaagccatgttttatccttttctggagagtagtctagaccaagccaattgcagaaccacattctttggttcccaggagagccccattcccagcccctggtctcccgtgccgcagttctatattctgcttcaaatcagccttcaggtttcccacagcatggcccctgctgacacgagaacccaaagttttcccaaatctaaatcatcaaaacagaatccccaccccaatcccaaattttgttttggttctaactacctccagaatgtgttcaataaaatgcttttataatataatcgacagctctctcgcccagcccagttctggaagggataaaaagggggcatcaccgttcctgggtaacagagccaccttctgcgtcctgctgagctctgttctctccagcacctcccaacccactagtgcctggttctcttgctccaccaggaacaagccaccatgtctcgccagtcaagtgtgtccttccggagcgggggcagtcgtagcttcagcaccgcctctgccatcaccccgtctgtctcccgcaccagcttcacctccgtgtcccggtccgggggtggcggtggtggtggcttcggcagggtcagccttgcgggtgcttgtggagtgggtggctatggcagccggagcctctacaacctggggggctccaagaggatatccatcagcactagtggtggcagcttcaggaaccggtttggtgctggtgctggaggcggctatggctttggaggtggtgccggtagtggatttggtttcggcggtggagctggtggtggctttgggctcggtggcggagctggctttggaggtggcttcggtggccctggctttcctgtctgccctcctggaggtatccaagaggtcactgtcaaccagagtctcctgactcc

SEQ ID NO: 840 - DNA, 4311 bp, Homo sapiens
  misc_feature (1694)..(1694): second gene starts at position 1694
atggcttccccaccccaccagcagctgctgcatcaccacagcaccgaggtgagctgcgactccagcggggacagcaacagcgtgcgcgtcaagatcaaccccaagcagctgtcctccaacagccaccccaagcactgcaaatacagcatctcctctagctgcagcagctctggggactccgggggcgtcccccggcgagtgggcggcggaggccggctgcgcaggcagaagaagctgccccagctgttcgagagggcctccagccgctggtgggaccccaagttcgactcggtgaacctggaggaggcctgcctggagcgctgcttcccgcagacccagcgccggttccggtatgcgctcttctacatcggcttcgcctgccttctgtggagcatctattttgcggtccacatgagatccagactgatcgtcatggtcgcccccgcgctgtgcttcctcctggtgtgtgtgggcttctttctgtttaccttcaccaagctgtacgcccggcattacgcgtggacctcgctggctctcaccctgctggtgttcgccctgaccctggctgcgcagttccaggtcttgacgcctgtctcaggacgcggcgacagctccaaccttacggccacagcccggcccacagatacttgcttatctcaagtggggagcttctccatgtgcatcgaagtgctctttttgctctataccgtcatgcacttacctttgtacctgagtttgtgtctgggggtggcctactctgtccttttcgagacctttggctaccatttccgggatgaagcctgcttcccctcgcccggagccggggccctgcactgggagctgctgagcagggggctgctccacggctgcatccacgccatcggggtccacctgttcgtcatgtcccaggtgaggtccaggagcaccttcctcaaggtggggcaatccattatgcacgggaaggacctggaagtggaaaaagccctcaaagagaggatgattcattccgtgatgccaagaatcatagccgatgacttaatgaagcagggagatgaggagagtgagaattctgtcaagaggcatgccacctcgagccccaagaacaggaagaaaaagtcttccatccaaaaagctcctatagccttccgcccttttaagatgcagcagatcgaagaagtcagtattttatttgcagatatcgtgggcttcaccaagatgagtgccaacaagtctgcccacgccctggtgggtctcctgaacgatctgttcggtcgcttcgaccgcctgtgtgaggagaccaagtgtgagaaaatcagcaccctgggagactgttactactgcgtggcgggctgtcccgagccccgggccgaccatgcctactgctgcatcgagatgggcctgggcatgatcaaggccatcgagcagttctgccaggagaagaaggagatggtgaacatgagagtcggggtgcacacgggcaccgtcctttgcggcatcctgggcatgaggaggtttaaatttgacgtgtggtccaacgatgtgaacctggccaatctcatggagcagctgggagtggccggcaaagttcacatttctgaggccaccgcaaaatacttagatgaccggtacgaaatggaagatgggaaagttattgaacggctgggccagagcgtggttgctgaccagttgaaagccctgcctgttccctgtccatccaggccagcagctgaaggagcctcacctgcctcccttctctgagtagcacggatttgaggagaagcagcgaagatgtccagcgagcctccccctccttatcctgggggccccacagccccacttctggaagagaaaagtggagccccgcccaccccaggccgttcctccccagctgtgatgcagccccctccaggcatgccactgccccctgcggacattggccccccaccctatgagccgccgggtcacccaatgccccagcctggcttcatcccaccacacatgagtgcagatggcacctacatgcctccgggtttctaccctcctccaggcccccacccacccatgggctactaccccccagggccctacacgccagggccctaccctggccctgggggccacacagccacagtcctggtcccttcaggagctgccaccacggtgacagtgctgcagggagagatctttgagggagcgcctgtgcagacggtgtgtccccactgccagcaggccatcaccaccaagatctcctacgagattggcttgatgaatttcgtgctgggtttcttctgttgcttcatgggatgtgatctgggctgctgcctgatcccctgcctcatcaatgacttcaaggatgtgacgcacacatgccccagctgcaaagcctacatctacacgtacaagcgcctgtgctaacggagctgggactcgggactcccccgcctgtcagtctggccccctgtgctttgctccctgtgctcagtggtcactttcccgctcccacttggggctgggagccgtgccaccatcccctagaagtcctgtcctcttcaccctgccctacctgagccgctgactcttctggcaaaaattctgttgggatttaaggccaagggtcagtgggtggcagggggctgacaatgagcttgtgtgttgttggtctgcttggtgtgtgtgatcgggaagataagctgggaggggtctcctgctggggtcctgatgcctctgtttccaaacaaggtacaggttcagtccagactctttccccctgggaccaacagcagccagagcagttagccagttagtccccaggcctgtggccacaggcgtttctgacctgctgggccgagaatgggtaagttgtctggagtcaggtgggcccacgtaggacagggtcacaaagcctgggtttgtttctgggtactttgcgcctctggggtgctagaggtggggcatggtggctggaagtaaaactgccaactctggccctcagaactctcaggtatagaagcccaggatgtctaataccctgtcccagtgcccgagagctgcctggtgtcaggtagagaggacactgtacctgggtgaatgatcagaccctggtagctaagaaggaacttgtccctttgagtcagtgtgcagaccccctttcaggccatgcctctgtgaaccctgtattgctggggccggaaggagcccctgagcctagccccttcccgtctgccctgtgtcctcactgcgtgtgggtatgacctctgcctggtggctggtgtatcccaactgggcaagagatggcagagggtcccccttgtgggtgcgcttggatgtgcagagccttctccatggattttcttccctgtaagtgccgggcccctcaccccagctgacaggctgttgctgtgcctgctcacacctgctcctgcaggcacactgggctagggacgaggaaggagcagccacaagtggtagaactgccttggtggacaccagcctcgccctgtctttatttcctgaatggtttgtgaacttgctcacctggaccactgtatcctgccactgtccttcctggtctcgcactgccactgcatggcctcctgtcactgtgaatcgtggcccagtctcagtttgtagtttctcattaaattggccctttcactcccccgccctgggcctctgctctcttgcctggcttccttcttttttgagggaaagagggtggggctgcaggcagtctactggcaggacgggaggctgagtcctcagggtctcacaccctcagtgctgatgccatgccaactgcctgggacaacaccaacacgtaaggacctaattaaaccaaaccagagtcgggtgtagaccagccctgggatttccagctgtgactgggccagggcacacgttggtctcggcagtggctgtaaggtcaccttccttcctctgatgctggtttcaaccatctatatatggcatccacgcatgggatctgcaagctggagccctcctacccgcaggcttgagcacagcatcatccagccctggggaggcgcacccttaagcaacacagactgggctgaggctgacaggcagaagactaacagagcgcagtctgcacacgcaggttctgggcgacctctggccctggccatctctgcactaactcatctgaattatgaaggtggcagtcttggtcagtagtttaaagagtttccctactttttaaccctttttgaaataaaacttttacaggtagtagattcctattaataaaattatttaagttcatgtttctcttttagagaatgaattgtttaa

SEQ ID NO: 841 - DNA, 32767 bp, Homo sapiens; identical to SEQ ID NO: 819

SEQ ID NO: 842 - DNA, 2795 bp, Homo sapiens
  misc_feature (1656)..(1656): second gene starts at position 1656
atgttcagcgtagagtcgctggagcgggcggagctgtgcgagagcctcctcacttggatccagacatttaatgtggatgcaccatgccagaccgtggaagatttaacgaatggggttgtgatggcccaggttcttcaaaagatagatcctgcatattttgatgaaaattggctaaacagaatcaaaactgaagtaggagataattggaggctaaagataagcaatttaaagaaaattttaaaaggaatcttggattataatcatgagattttaggacagcaaattaatgactttacccttcctgatgtgaaccttattggggagcattctgatgcagcagagcttggaaggatgcttcagctcatcttaggctgtgctgtgaactgtgaacagaagcaagagtacatccaagccattatgatgatggaggaatctgttcaacatgttgtcatgacagccattcaagagctgatgagtaaagaatctcctgtctctgctggaaatgatgcctatgttgaccttgatcgtcagctgaagaaaactacagaggaactaaatgaagctttgtcagcaaaggaagaaattgctcaaagatgccatgaactggatatgcaggttgcagcattgcaggaagagaaaagtagtttgttggcagagaatcaggtattaatggaaagactcaatcaatctgattctatagaagaccctaacagtccagcaggaagaaggcatttgcagctccagactcaattagaacagctccaagaagaaacattcagactagaagcagccaaagatgattatcgaatacgttgtgaagagttagaaaaggagatctctgaacttcggcaacagaatgatgaactgaccactttggcagatgaagctcagtctctgaaagatgagatcgacgtgctgagacattcttctgataaagtatctaaactagaaggtcaagtagaatcttataaaaagaagctagaagaccttggtgatttaaggcggcaggttaaactcttagaagagaagaataccatgtatatgcagaatactgtcagtctagaggaagagttaagaaaggccaacgcagcgcgaagtcaacttgaaacctacaagagacaggtagtagaactacaaaacagattatccgaagaatcaaagaaagcagataaactagattttgaatataagcggctaaaagaaaaagttgacagtcttcaaaaagaaaaggacaggctgagaacagaaagggattctctgaaggaaaccattgaagagcttcgttgtgtacaagctcaagaagggcagctcacaacacaagggttaatgcctcttggaagtcaggagtcttcagacagtctagctgcagagattgttacacctgaaatcagggagaaacttattcgtcttcagcatgagaataagatgttaaagcttaaccaagaaggttcggacaatgaaaaaatagccttattgcagagccttctagatgatgcaaatctacgcaagaatgaactggagacagagaataggctggtgaatcaaagacttctggaagtacagtcacaagttgaagaattacaaaaatctttacaggatcaaggctcaaaagcagaagattcagtccttctaaaaaagaagcttgaagaacatctgcatcataggcgagtattagtggaatggctaagagatccatctcaggagcttgaatttattgctgatattcttaatcaggatgcaaagaattatcatgcctggcagcatcgacaatgggttattcaggaatttaaactttgggataatgagctgcagtatgtggaccaacttctgaaagaggatgtgagaaataactctgtctggaaccaaagatacttcgttatttctaacaccactggctacaatgatcgtgctgtattggagagagaagtccaatacactctggaaatgattaaactagtaccacataatgaaagtgcatggaactatttgaaagggattttgcaggatcgtggtctttccaaatatcctaatctgttaaatcaattacttgatttacaaccaagtcatagttccccctacctaattgcctttcttgtggatatctatgaagacatgctagaaaatcagtgtgacaataaggaagacattcttaataaagcattagagttatgtgaaatcctagctaaagaaaaggacactataagaaaggaatattggagatacattggaagatcccttcaaagcaaacacagcacagaaaatgactcaccaacaaatgtacagcaataacaccatccagaagaacttgatggaatgcttttattttttattaagggaccctgcaggagtttcacacgagagtggtccttccctttgcctgtggtgtaaaagtgcatcacacaggtattgctttttaacaagaactgatgctccttgggtgctgctgctactcagactagctctaagtaatgtgattcttctaaagcaaagtcattggatgggaggaggaagaaaaagtcccataaaggaacttttgtagtcttatcaacatataatctaatcccttagcatcagctcctccctcagtggtacatgcgtcaagatttgtagcagtaataactgcaggtcacttgtatgtaatggatgtgaggtagccgaagtttggttcagtaagcagggaatacagtcgttccatcagagctggtctgcacactcacattatcttgctatcactgtaaccaactaatgccaaaagaacggttttgtaataaaattatagctgtatctaaaaacaa

SEQ ID NO: 843 - DNA, 2787 bp, Homo sapiens
  misc_feature (1656)..(1656): second gene starts at position 1656
atgttcagcgtagagtcgctggagcgggcggagctgtgcgagagcctcctcacttggatccagacatttaatgtggatgcaccatgccagaccgtggaagatttaacgaatggggttgtgatggcccaggttcttcaaaagatagatcctgcatattttgatgaaaattggctaaacagaatcaaaactgaagtaggagataattggaggctaaagataagcaatttaaagaaaattttaaaaggaatcttggattataatcatgagattttaggacagcaaattaatgactttacccttcctgatgtgaaccttattggggagcattctgatgcagcagagcttggaaggatgcttcagctcatcttaggctgtgctgtgaactgtgaacagaagcaagagtacatccaagccattatgatgatggaggaatctgttcaacatgttgtcatgacagccattcaagagctgatgagtaaagaatctcctgtctctgctggaaatgatgcctatgttgaccttgatcgtcagctgaagaaaactacagaggaactaaatgaagctttgtcagcaaaggaagaaattgctcaaagatgccatgaactggatatgcaggttgcagcattgcaggaagagaaaagtagtttgttggcagagaatcaggtattaatggaaagactcaatcaatctgattctatagaagaccctaacagtccagcaggaagaaggcatttgcagctccagactcaattagaacagctccaagaagaaacattcagactagaagcagccaaagatgattatcgaatacgttgtgaagagttagaaaaggagatctctgaacttcggcaacagaatgatgaactgaccactttggcagatgaagctcagtctctgaaagatgagatcgacgtgctgagacattcttctgataaagtatctaaactagaaggtcaagtagaatcttataaaaagaagctagaagaccttggtgatttaaggcggcaggttaaactcttagaagagaagaataccatgtatatgcagaatactgtcagtctagaggaagagttaagaaaggccaacgcagcgcgaagtcaacttgaaacctacaagagacaggtagtagaactacaaaacagattatccgaagaatcaaagaaagcagataaactagattttgaatataagcggctaaaagaaaaagttgacagtcttcaaaaagaaaaggacaggctgagaacagaaagggattctctgaaggaaaccattgaagagcttcgttgtgtacaagctcaagaagggcagctcacaacacaagggttaatgcctcttggaagtcaggagtcttcagacagtctagctgcagagattgttacacctgaaatcagggagaaacttattcgtcttcagcatgagaataagatgttaaagcttaaccaagaaggttcggacaatgaaaaaatagccttattgcagagccttctagatgatgcaaatctacgcaagaatgaactggagacagagaataggctggtgaatcaaagacttctggaagtacagtcacaagttgaagaattacaaaaatctttacaggatcaaggctcaaaagcagaagattcagtccttctaaaaaagaagcttgaagaacatctgcatcataggcgagtattagtggaatggctaagagatccatctcaggagcttgaatttattgctgatattcttaatcaggatgcaaagaattatcatgcctggcagcatcgacaatgggttattcaggaatttaaactttgggataatgagctgcagtatgtggaccaacttctgaaagaggatgtgagaaataactctgtctggaaccaaagatacttcgttatttctaacaccactggctacaatgatcgtgctgtattggagagagaagtccaatacactctggaaatgattaaactagtaccacataatgaaagtgcatggaactatttgaaagggattttgcaggatcgtggtctttccaaatatcctaatctgttaaatcaattacttgatttacaaccaagtcatagttccccctacctaattgcctttcttgtggatatctatgaagacatgctagaaaatcagtgtgacaataaggaagacattcttaataaagcattagagttatgtgaaatcctagctaaagaaaaggacactataagaaaggaatattggagatacattggaagatcccttcaaagcaaacacagcacagaaaatgactcaccaacaaatgtacagcaataacaccatccagaagaacttgatggaatgcttttattttttattaagggaccctgcaggagtttcacacgagagtggtccttccctttgcctgtggtgtaaaagtgcatcacacaggtattgctttttaacaagaactgatgctccttgggtgctgctgctactcagactagctctaagtaatgtgattcttctaaagcaaagtcattggatgggaggaggaagaaaaagtcccataaaggaacttttgtagtcttatcaacatataatctaatcccttagcatcagctcctccctcagtggtacatgcgtcaagatttgtagcagtaataactgcaggtcacttgtatgtaatggatgtgaggtagccgaagtttggttcagtaagcagggaatacagtcgttccatcagagctggtctgcacactcacattatcttgctatcactgtaaccaactaatgccaaaagaacggttttgtaataaaattatagctgtatct

SEQ ID NO: 844 - DNA, 975 bp, Homo sapiens
  misc_feature (505)..(505): second gene starts at position 505
atggaccgcggcgagcaaggtctgctgagaacagacccagtccctgaggaaggagaagatgttgctgccacgatcagtgccacagagaccctctcggaagaggagcaggaagagctaagaagagaacttgcaaaggtagaagaagaaatccagactctgtctcaagtgttagcagcaaaagagaagcatctagcagagatcaagcggaaacttggaatcaattctctacaggaactaaaacagaacattgccaaagggtggcaagacgtgacagcaacatctgcttacaagaagacatctgaaaccttatcccaggctggacagaaggcctcagctgctttttcgtctgttggctcagtcatcaccaaaaagctggaagatgtaaaattgcaagccttttcacattcctttagtatacgttccattcagcattcaattagcatgcctgctatgagaaactccccaacttttaaatcatttgaagaaaaggtcgaaaacttaaagggttctccaaaaaatgtggaatcctttgcatctatgctgagacattctcctcttacacagatgggacctgcaaaggataaactggtcattggacggatctttcatattgtggagaatgatctgtacatagattttggtggaaagtttcattgtgtatgtagaagaccagaagtggatggagagaaataccagaaaggaaccagggtccggttgcggctattagatcttgaacttacgtctaggttcctgggagcaacaacagatacaactgtactagaggctaatgcagttctcttgggaatccaggagagtaaagactcaagatcgaaagaagaacatcatgaaaaataaatgaactttgcttagtggattgactcctttgctgaagtcagttattcatcaagaatgcaattagactaattgtgaataaatgattgaatgaagatataataaataaaagctataattata

SEQ ID NO: 845 - DNA, 906 bp, Homo sapiens
  misc_feature (436)..(436): second gene starts at position 436
atggaccgcggcgagcaaggtctgctgagaacagacccagtccctgaggaaggagaagatgttgctgccacgatcagtgccacagagaccctctcggaagaggagcaggaagagctaagaagagaacttgcaaaggtagaagaagaaatccagactctgtctcaagtgttagcagcaaaagagaagcatctagcagagatcaagcggaaacttggaatcaattctctacaggaactaaaacagaacattgccaaagggtggcaagacgtgacagcaacatctgcttacaagaagacatctgaaaccttatcccaggctggacagaaggcctcagctgctttttcgtctgttggctcagtcatcaccaaaaagctggaagatgtaaaaaactccccaacttttaaatcatttgaagaaaaggtcgaaaacttaaagggttctccaaaaaatgtggaatcctttgcatctatgctgagacattctcctcttacacagatgggacctgcaaaggataaactggtcattggacggatctttcatattgtggagaatgatctgtacatagattttggtggaaagtttcattgtgtatgtagaagaccagaagtggatggagagaaataccagaaaggaaccagggtccggttgcggctattagatcttgaacttacgtctaggttcctgggagcaacaacagatacaactgtactagaggctaatgcagttctcttgggaatccaggagagtaaagactcaagatcgaaagaagaacatcatgaaaaataaatgaactttgcttagtggattgactcctttgctgaagtcagttattcatcaagaatgcaattagactaattgtgaataaatgattgaatgaagatataataaataaaagctataattata

SEQ ID NO: 846 - DNA, 1026 bp, Homo sapiens
  misc_feature (556)..(556): second gene starts at position 556
atggattgtagagagatggacttatatgaggactaccagtccccgtttgattttgatgcaggagtgaacaaaagctatctctacttgtctcctagtggaaattcatctccacccggatcacctactcttcagaaatttggtctgctgagaacagacccagtccctgaggaaggagaagatgttgctgccacgatcagtgccacagagaccctctcggaagaggagcaggaagagctaagaagagaacttgcaaaggtagaagaagaaatccagactctgtctcaagtgttagcagcaaaagagaagcatctagcagagatcaagcggaaacttggaatcaattctctacaggaactaaaacagaacattgccaaagggtggcaagacgtgacagcaacatctgcttacaagaagacatctgaaaccttatcccaggctggacagaaggcctcagctgctttttcgtctgttggctcagtcatcaccaaaaagctggaagatgtaaaaaactccccaacttttaaatcatttgaagaaaaggtcgaaaacttaaagggttctccaaaaaatgtggaatcctttgcatctatgctgagacattctcctcttacacagatgggacctgcaaaggataaactggtcattggacggatctttcatattgtggagaatgatctgtacatagattttggtggaaagtttcattgtgtatgtagaagaccagaagtggatggagagaaataccagaaaggaaccagggtccggttgcggctattagatcttgaacttacgtctaggttcctgggagcaacaacagatacaactgtactagaggctaatgcagttctcttgggaatccaggagagtaaagactcaagatcgaaagaagaacatcatgaaaaataaatgaactttgcttagtggattgactcctttgctgaagtcagttattcatcaagaatgcaattagactaattgtgaataaatgattgaatgaagatataataaataaaagctataattata

SEQ ID NO: 847 - DNA, 2160 bp, Homo sapiens
  misc_feature (815)..(815): second gene starts at position 815
atgcagccctccagccttctgccgctcgccctctgcctgctggctgcacccgcctccgcgctcgtcaggatcccgctgcacaagttcacgtccatccgccggaccatgtcggaggttgggggctctgtggaggacctgattgccaaaggccccgtctcaaagtactcccaggcggtgccagccgtgaccgaggggcccattcccgaggtgctcaagaactacatggacgcccagtactacggggagattggcatcgggacgcccccccagtgcttcacagtcgtcttcgacacgggctcctccaacctgtgggtcccctccatccactgcaaactgctggacatcgcttgctggatccaccacaagtacaacagcgacaagtccagcacctacgtgaagaatggtacctcgtttgacatccactatggctcgggcagcctctccgggtacctgagccaggacactgtgtcggtgccctgccagtcagcgtcgtcagcctctgccctgggcggtgtcaaagtggagaggcaggtctttggggaggccaccaagcagccaggcatcaccttcatcgcagccaagttcgatggcatcctgggcatggcctacccccgcatctccgtcaacaacgtgctgcccgtcttcgacaacctgatgcagcagaagctggtggaccagaacatcttctccttctacctgagcagggacccagatgcgcagcctgggggtgagctgatgctgggtggcacagactccaagtattacaagggttctctgtcctacctgaatgtcacccgcaaggcctactggcaggtcaagtgtgtgaagctggaccggccccgcttcgagcgtgtgctggggccctgctctgagatcctcaagaggaacattcagcgttacaacagcttcatctccctcaccgtctgagcacagctcccgccctgcagccccagctccccagtgtggtggccgtgccctgctcgtctgtgtcgggggcccgggagccgctgtgtgaggtgtgggccgggtggggctgggtcccggcagcgtgaggactgccccttccccggactcactttttggaataaatgatcaccttgtgcatttccaaatcaaaggacaagcggacaaaatgcatcccaagatcaaggaagggacaggccagcttcctccccacacgcctccccggctgcctctgtgggcttctcctggggggcccaccccacccctgccagtctcctggagatgcttgaggatcggtcctccccagaaccaggccaggacgttgcccctggggcctggtgaccctgtgaggtcaggtcccccagattgaggtctgagtgtgggcaagtgtgtcaaaaggggctgccccccaggggagatgaggctgagagcagggagttgaggccgaagaagtcaaggcccctcccgcaaatgtgtacccctgcccgcgccactgcaccccgccgcacccccacctcccccgggggccctgctgcggatgccggagtgggagagtctctgagctgtgagattgatcttgcccctaattggagaggaagccgggcgccaagacacacggggctcctgccttgggagccagggccgcggccgcaggtagaccccagtagggggggccgggctcgaagttcctttgggaggggctggcgggactccagcaggccgtcctcacctttcttagaaagtccacccagggcaagttgatgttgggggaaagcagaagtcaagccagccgcgggccccacacgccccgacccgctcaaccgacttgtcccttaaatgtgtcttggatcccgcagtgatgacgtgagccagccaggcccgaaagggtgaggccagtgcagagaagcttcccaggggattcctgggttcccccgaaagacaagcgaggtcattgcagttcacctgatgttgctcctgtcccgtgcgtcccggggaggctgtccttggtccgaggctgctcgttgcagcccctcccctgctggcggttacgatgcgtggggtccccctccccacccagccccggccacgtcgccgtgtcccgcctgtgcctgtgacgtccctgtggacctgtgagccatccccccccttatctctgctctgaatactgcatgaagcattaaacgtgcaatgaagtac

SEQ ID NO: 848 - DNA, 2160 bp, Homo sapiens; identical to SEQ ID NO: 847
  misc_feature (815)..(815): second gene starts at position 815

SEQ ID NO: 849 - DNA, 2160 bp, Homo sapiens; identical to SEQ ID NO: 847
  misc_feature (815)..(815): second gene starts at position 815

SEQ ID NO: 850 - DNA, 2160 bp, Homo sapiens; identical to SEQ ID NO: 847
  misc_feature (815)..(815): second gene starts at position 815

SEQ ID NO: 851 - DNA, 2160 bp, Homo sapiens; identical to SEQ ID NO: 847
  misc_feature (815)..(815): second gene starts at position 815

SEQ ID NO: 852 - DNA, 2160 bp, Homo sapiens; identical to SEQ ID NO: 847
  misc_feature (815)..(815): second gene starts at position 815

SEQ ID NO: 853 - DNA, 9636 bp, Homo sapiens
  misc_feature (892)..(892): second gene starts at position 892
atgtacaacgggatcgggctgccgacgccccggggcagcggcaccaacggctacgtccagcgcaacctgtccctggtgcggggccgccggggtgagcggcctgactacaagggagaggaggaactgcggcgcctggaggctgccctggtgaagcggcctaatcctgacatcctggaccacgagcgcaagcggcgcgtcgagctgcgatgcctcgagctggaggagatgatggaagagcaggggtacgaggaacagcaaattcaggaaaaagtggcgacctttcgactcatgttgctggagaaggatgtgaaccctgggggcaaggaggagaccccagggcagaggccagcggtcacggagactcaccagttggcagaattaaatgagaagaagaatgaaagactccgtgctgcctttggcatcagtgattcttacgtagatggcagctcttttgatcctcagcgtcgtgcccgagaagctaaacaaccagctcctgagcctcccaaaccttacagccttgttcgggagtctagcagttctcgctcaccaaccccaaagcagaagaagaagaaaaagaagaaagatagaggacgcaggtcagagagcagctctcctcgacgggagagaaagaaaagctcaaagaagaagaagcacaggtcagaatctgagtccaagaaacgtaagcataggtctcccactccaaagagcaaacgtaaatctaaggacaaaaagcgaaagcggtctcgaagtacaacaccagcccccaagagccgccgggcccaccgttcaacttctgctgactctgcttcctcctccgatacttcccgcagtcggtctcgaagtgctgcagctaaaactcatacaactgccttggctgggcgaagtccttcccctgcttcagggcgacgcggggagggagatgcgcctttcagtgaaccaggtactaccagcacacaacggcctagtagcccggagactgctacgaaacagcctagcagcccttatgaagacaaagataaagacaagaaggagaaatctgcaactcgacctagcccctctccggaaaggagcagcacaggcccagaaccacctgctcccactccgctccttgctgagcgacatggcggctccccacaaccccttgcaaccacccccttaagccaggagccagtgaaccccccatctgaggcctctccaactcgggaccgttcaccacctaagtctcccgagaaacttccccagtcttcttcctcagagagcagcccaccatcccctcaacctaccaaagtttctcggcatgccagctcttccccagaaagtcctaaacctgctccagctccagggtcccaccgagagatttcttcttctcccacatctaagaatcgctcacatggccgagcaaaacgggataaatcacattctcataccccctcccgtaggatggggaggtcccgtagccctgccaccgctaagagagggcgatctcggtctcgaacccctaccaagagaggtcattctcgatcccgatctccccagtggcgtaggtccaggtctgcacagaggtggggaagatctagaagcccccagcgacgtggccgctctaggtctcctcagcgaccaggctggtctaggagcagaaatacccagagaagaggcaggtctaggtcagcaaggcgagggaggtcccactctagatccccagccactaggggtagatctcgttctagaacaccagcccgccggggcaggtcccgctctagaacacctgccaggcggagatcacgatccagaactcccaccaggcgtaggtctcggtctagaacaccagcccggaggggcaggtctcggtctagaacacctgctaggcgcagatctaggacccgatcaccagtacgacgcaggtctcgtagtagatcaccagccaggagaagtggcaggtcacgctctagaaccccagctagacgtggccgctcacgctccagaaccccagccagacgtggccgctcacgctctagaaccccagctagacgcagtggtcgctcacgctccagaacaccagccaggagagggaggtctcggtctaggacaccaagacgaggaagatcccgcagtagaagcttagttagacgtggaagatctcactctagaacacctcaaagaagaggcagatctggctcatcttcagagcggaaaaacaaatccagaacatctcaaagaagaagcaggtccaattcaagcccagaaatgaagaaatctcgcatttcttcaaggcggagcaggtctctctcttcaccacggtccaaagcaaaatctcgcttgtctttgaggcgcagcctttcagggtcttccccatgccctaaacaaaagtcacagacaccacccaggcgcagtcgctctggatcctcccaacctaaagctaaatctagaacgccacccagacgcagtcgctccagttcttctccgccacctaaacagaaatctaagacaccatcaagacaaagtcattccagttcatctcctcatcctaaagtgaaatctggaacaccaccgaggcaagggtccataacaagtccccaggccaatgagcaatctgtaacgccacagagacggagctgttttgaatcatcacctgaccctgagttgaaatctaggaccccttctagacatagctgctcagggtcctctcctcctagagtgaaatctagcacacctcccagacagagcccatctaggtcatcatctccacaacccaaagtgaaggcaataatatcaccaagacaaagaagccattctggctcctcttctccaagtcctagtagggtgacgtcgagaacaactccacggcgaagcagatcagtatctccctgctccaatgtggaatccagattgttgccaagatacagtcattctgggtcctcctcaccagataccaaagtgaaacctgaaacaccgccaagacaaagtcactcagggtctatttcaccataccccaaagtaaaggcccaaactccaccggggccaagtctttctggatcaaagtcaccatgtccccaagagaagtctaaagactcactagttcaaagttgccctggatccctctctctctgtgcaggagtaaaatctagcacaccaccaggcgagagctattttggtgtctcatctctgcaactgaaaggacaatctcaaacttcaccagaccacagatctgatacttcaagtccagaagtgagacagagtcattcagaatcaccatctctgcagagcaaatctcaaacatcacctaagggaggtcggtccaggtcttcatctccagtcactgagctggcatccagatctccaataagacaagatagaggtgagttctcagcgagtcctatgttgaaatctggaatgtctcctgagcagagcaggttccagtctgactcttcttcatatcctacagtggactcgaattctctcttggggcagagtagattggagactgctgaatcaaaagagaaaatggccttaccccctcaggaggatgctactgcatcacctcctagacagaaagacaaatttagtccctttccagtacaggataggcctgagtcttcactggtattcaaagacacacttagaaccccgccaagggaaagaagtggtgctgggtcatctccagaaacaaaagagcaaaatagtgcattgcctacgtcaagccaagatgaagagttaatggaggtggtagagaagtctgaagaacccgcaggccaaatcctgtctcatttgtcttcagaacttaaagaaatgtccacaagtaactttgaatcatctcctgaagtagaagaaaggcctgctgtgtctttgactcttgatcagagccagtcacaggcttctttggaagcagtagaagtcccttcaatggcctcatcttggggtgggccacatttttctccagaacataaagaactgtctaactccccactcagggagaacagctttggatcacctttagaatttagaaactcaggcccacttggtacagaaatgaatactggattttcttctgaggttaaagaagatttgaatggaccgtttcttaatcagctggaaacagatccatctctagacatgaaagaacaatcgacaagatcctctggacacagcagttctgagttatccccagatgcagtggaaaaggcagggatgtcttcaaatcagagcatctcttcacctgtgcttgatgctgtacccagaacaccctcgagagaaagaagtagttctgcatcttctcctgaaatgaaagatggtttacccagaactccatcaaggagaagcaggtctgggtcttctccaggacttagagatgggtctgggactccctcgaggcacagcctgtctgggtcctctcctggaatgaaagatatacctagaacgccatctagagggagaagcgaatgtgattcttccccagaaccgaaagctttgcctcagactcctaggccgaggagtcgttctccatcatccccagagctcaacaacaagtgtcttaccccccagagagaaagaagcgggtcagaatcatcagttgatcagaaaactgtggctcggactcccctggggcagagaagtcgttcgggatcctctcaagaacttgatgtgaaacccagtgcatcccctcaggaaagaagtgagtcagactcttctccagattctaaagccaagacaagaaccccacttcggcagaggagtcggtctggatcatctccagaggttgacagcaaatctcgactatcccctcggcgcagtaggtctggttcctcccctgaagtgaaagataagccaagagcagcacccagggcacagagtggttctgattcctctcctgaacctaaagctccagcccctcgggcccttcccagacgaagcagatcaggttcatcaagcaaaggcagaggcccttctcctgaaggaagcagcagtaccgagtcctctcctgaacatccgcccaaatccagaactgctcgcagaggttccaggtcatcaccagagcccaagaccaagtctcgtacaccacctcgacgtcgcagctctcgatcatctccggagctaacaaggaaggccagactgtcccgtagaagccgctctgcctcatcctcaccagaaactcgctctagaactcccccaaggcaccggagaagtccctcagtgtcttccccggagccagccgaaaaatcgaggtcttcacgccgacggcgctcagcttcatctccacgcactaagacaacctcaaggagaggccgctctccttcgccaaagcctcgtggactccagaggtcccgttcccgctcaaggagagagaaaacaagaacaacccgacgtcgagataggtctggatcttctcagtcaacctctcggcgaagacagcggagccggtcaaggtcgcgggttactcggcggcggaggggaggctctggttatcactcaaggtcacctgcccggcaggaaagttcccggacctcctctcgacgccgaagaggccgctctcggacacccccaaccagtcggaagcgttctcgctcacgcacatcaccagccccgtggaaacgctctagatctcgagcctctccagccactcaccggcgatccaggtccagaacccccctgataagccgacgtaggtccagatctcgaacttcaccagtcagccggagacggtcaaggtccaggacttcagtgactcgacgaagatcccggtcaagagcatccccagtgagcagaaggcgatccagatccagaacgccaccagtaacccgccgtcgttcaaggtctagaacgccaacaacacgccgccgctcccgttctagaactccaccagtgactcgcagaaggtccagatccaggactccaccagtaaccaggaggcgatctcgaagcagaacttcgcctatcactcgcagaagatcaagatccagaacatctccggtcacccgaaggagatctcgatctcgcacatctccagtaactcgaagaaggtcccgctctcgaacctcaccagtgacacgccgccgctctaggtcccggacacctccagctattcggcgccgctctagatctcgaacgccactgttaccacgcaaacgttctcgaagtcgctcaccacttgctatccgccgccgctccagatcccgtactccacgaacagctcggggtaaacggtccttaacaagatctcctccagccatccgcaggcgttctgcatctggaagtagttctgatcgttcacgatctgctactcctccagcaacaagaaatcattctggttcacggacacctccagtagcactcaacagttccagaatgagctgcttcagtcgtcctagcatgtccccaacacctcttgatcgctgcagatcacctggaatgcttgaaccccttggcagctctagaacacccatgtctgtcctgcagcaagccggcggctccatgatggatggtccaggtccccgaatacctgaccaccagagaacatctgtgccagaaaatcatgctcagtccaggattgcacttgccctgacagctatcagtcttggcaccgctcggcctcctccgtccatgtctgctgctggccttgctgcaagaatgtcccaggttccagccccggtgcctctcatgagtctcagaaccgcaccagcagccaaccttgccagcaggattcctgcagcctctgcggcagccatgaacctagccagcgccaggacacctgccattccaacagcagtgaacctggctgactctcgaacgccagctgcagcagcggccatgaacttggccagccccagaacagcggtggcaccttcggctgtgaacctggctgaccctcgcactcccacagccccagctgtgaacctagcaggggccagaaccccagctgccttggcagctctgagtctcacaggctctggcacaccaccaactgctgcaaactatccctccagctccagaacaccacaggctccagcctctgcaaacctggtgggtcctcggtctgcacatgccacagctcctgtgaatattgccggctccagaaccgccgcagccttggcccccgcgagcctcaccagtgctaggatggctccagcattgtctggtgcaaacctcaccagccccagggtgcccctttctgcctacgagcgtgtcagtggcagaacctcaccaccgctccttgaccgagctaggtccagaacaccaccgtctgccccaagccaatctaggatgacctctgaacgggctccctccccttcctctagaatgggccaggctccttcacagtctcttctccctccagcacaggatcagccgaggtctcctgtgccttctgctttttcagaccaatcccgttgtttgattgcccagaccacccctgtagcagggtctcagtccctttcctctggggcagtggcaacgaccacgtcctctgctggtgatcacaatggcatgctctctgtccctgcccctggggtgccccactctgatgtgggggagccacctgcctctactggggcccagcagccttctgcattagccgccctgcagccagcaaaggagcggcggagttcctcctcgtcgtcgtcgtcctctagctcctcctcttcttcatcatcgtcgtcgtcgtcctcctcctcctctggctccagttctagtgactcagagggctctagccttcctgtgcaacctgaggtggcactgaagagggtccccagccccaccccagccccaaaggaggctgttcgagagggacgtcctccggagccaaccccagccaaacggaagaggcgctctagcagttccagttccagctcctcctcttcatcttcctcctcctcctcctcctcctcttcttcctcctcctaagaagaggaagataaagatgatgaagaaaaacccaagatcgaagatgtgggttcagatgaggaggatgacagcggtaaggataagaagaagaaaactaagaagatcaaagagaaatacattgatcaggaagaactaaacaagaccaagcctatttggaccagaaaccctgatgacatcacccaagaggagtatggagaattctacaagagcctcactaatgactgggaagaccacttggcagtcaagcacttttctgtagaaggtcagttggaattcagggcattgctatttattcctcgtcgggctccctttgacctttttgagaacaagaagaaaaagaacaacatcaaactctatgtccgccgtgtgttcatcatggacagctgtgatgagttgataccagagtatctcaattttatccgtggtgtggttgactctgaggatctgcccctgaacatctcccgagaaatgctccagcagagcaaaatcttgaaagtcattcgcaaaaacattgttaagaagtgccttgagctcttctctgagctggcagaagacaaggagaattacaagaaattctatgaggcattctctaaaaatctcaagcttggaatccacgaagactccactaaccgccgccgcctgtctgagctgctgcgctatcatacctcccagtctggagatgagatgacatctctgtcagagtatgtttctcgcatgaaggagacacagaagtccatctattacatcactggtgagagcaaagagcaggtggccaactcagcttttgtggagcgagtgcggaaacggggcttcgaggtggtatatatgaccgagcccattgacgagtactgtgtgcagcagctcaaggaatttgatgggaagagcctggtctcagttaccaaggagggtctggagctgcctgaggatgaggaggagaagaagaagatggaagagagcaaggcaaagtttgagaacctctgcaagctcatgaaagaaatcttagataagaaggttgagaaggtgacaatctccaatagacttgtgtcttcaccttgctgcattgtgaccagcacctacggctggacagccaatatggagcggatcatgaaagcccaggcacttcgggacaactccaccatgggctatatgatggccaaaaagcacctggagatcaaccctgaccaccccattgtggagacgctgcggcagaaggctgaggccgacaagaatgataaggcagttaaggacctggtggtgctgctgtttgaaaccgccctgctatcttctggcttttcccttgaggatccccagacccactccaaccgcatctatcgcatgatcaagctaggtctaggtattgatgaagatgaagtggcagcagaggaacccaatgctgcagttcctgatgagatcccccctctcgagggcgatgaggatgcgtctcgcatggaagaagtcgattaggttaggagttcatagttggaaaacttgtgcccttgtatagtgtccccatgggctcccactgcagcctcgagtgcccctgtcccacctggctccccctgctggtgtctagtgtttttttccctctcctgtccttgtgttgaaggcagtaaactaagggtgtcaagccccattccctctctactcttgacagcaggattggatgttgtgtattgtggtttattttattttcttcattttgttctgaaattaaagtatgcaaaataaagaatatgccgtttt

SEQ ID NO: 854 - DNA, 4648 bp, Homo sapiens
  misc_feature (1455)..(1455): second gene starts at position 1455
atggccctcgtactcggctccctgttgctgctggggctgtgcgggaactccttttcaggagggcagccttcatccacagatgctcctaaggcttggaattatgaattgcctgcaacaaattatgagacccaagactcccataaagctggacccattggcattctctttgaactagtgcatatctttctctatgtggtacagccgcgtgatttcccagaagatactttgagaaaattcttacagaaggcatatgaatccaaaattgattatgacaagccagaaactgtaatcttaggtctaaagattgtctactatgaagcagggattattctatgctgtgtcctggggctgctgtttattattctgatgcctctggtggggtatttcttttgtatgtgtcgttgctgtaacaaatgtggtggagaaatgcaccagcgacagaaggaaaatgggcccttcctgaggaaatgctttgcaatctccctgttggtgatttgtataataataagcattggcatcttctatggttttgtggcaaatcaccaggtaagaacccggatcaaaaggagtcggaaactggcagatagcaatttcaaggacttgcgaactctcttgaatgaaactccagagcaaatcaaatatatattggcccagtacaacactaccaaggacaaggcgttcacagatctgaacagtatcaattcagtgctaggaggcggaattcttgaccgactgagacccaacatcatccctgttcttgatgagattaagtccatggcaacagcgatcaaggagaccaaagaggcgttggagaacatgaacagcaccttgaagagcttgcaccaacaaagtacacagcttagcagcagtctgaccagcgtgaaaactagcctgcggtcatctctcaatgaccctctgtgcttggtgcatccatcaagtgaaacctgcaacagcatcagattgtctctaagccagctgaatagcaaccctgaactgaggcagcttccacccgtggatgcagaacttgacaacgttaataacgttcttaggacagatttggatggcctggtccaacagggctatcaatcccttaatgatatacctgacagagtacaacgccaaaccacgactgtcgtagcaggtatcaaaagggtcttgaattccattggttcagatatcgacaatgtaactcagcgtcttcctattcaggatatactctcagcattctctgtttatgttaataacactgaaagttacatccacagaaatttacctacattggaagagtatgattcatactggtggctgggtggcctggtcatctgctctctgctgaccctcatcgtgattttttactacctgggcttactgtgtggcgtgtgcggctatgacaggcatgccaccccgaccacccgaggctgtgtctccaacaccggaggcgtcttcctcatggtgttgatatccctgaaagtacttaatagcatcgtgctgttggggaaatcgtgccagtatgtgaaggaagccaaaatggaagagaagctgtcgaatcctcccgcaacctgcactccaggcaagccgtccagtaaatcacagaacaaatgtaaaccctctcaaggcctttccacagaagaaaacctgtctgcctccatcaccaaacaacctattcatcaaaaggaaaatatcataccattacttgtgacaagcaattctgatcagtttttgacaactccagatggtgacgagaaggacataacgcaggacaattctgaattaaaacacagatcctcaaagaaagatttgttagagatagacaggttcacaatttgtggaaaccgaattgactgaatctgtggcttcatgcgctgaagaagctgggtcctggggcaacaagtgctgtgttgccaggacaaatagatgctaaacatggcacttaaatatttatttaaaaacttaaattattattggcaagcaaatcttagtatctttcttccagtaatatggcctggctgagggtcagaccacaggacaggagcgacctccggccttgactgtctgggaagcttgatggattataaaacttcctcctgcctggccaagcagcagcatcatttccaggacccaacaaaggcaacatcaaaatctgttttgctttgtcagtctgggcttccagaatgttgaatttgcctcaaggcctcttcagtataaggaaatacctggaaaactgtgaaacttttaccacgacgtaatctttccagtctcatactattttcacaaacagttttcaaacgttacttcatctgccaaagcattaaaaaaattaaacataagtcaagataaatgttcttaccaccagaataacccttaaagatgtatcttaattaatcagaataaaaggctaccttaaataagacatgatgaatagtagcattttgtagggttaaaaaaaaatgctaaactagtttatttattaaaaaaataattaatgaaggctatgcattactgggaaaaatccttcataatttttcagtttactctttaaagcaaaatgtgagctgtatgtcatttaattggtggataaaacaaatttccttacaaaagggcactttttacaccaaggaagcagagcagtgttaactttaaggtatacttaactgattttgctttaaaactaattacttcataaattattacagctaaaaggattcgatgttgaacaggctgaaaaattgtcaatgtacaaaattcaaaactgtcaactttaactgtaaagtaaatgctccaagtgtgttagacagcatcatcttgcttgggcttaccaaatgcattagtctttgtgtttgggtcgacagcgagtgtgcctgtgctggggcagggtgtgtgttctgtgggagggtgtctgtggggatgtgactatcagggtgggcctgtgctggggatggggcaggcctgggtctggagaggattttgtgtgaaagtaaatggggtgtttgaggcgtatgggtggctgttggtgtggggaggcatctgtgtatggctgttgggaacagcaaccaaaaggtgctttttggttttatttgagatgaagattgtgtttccgcttaattactagtttgtggtctatatcatagaagttatttcccaccccattttatcttgacaaccgtgtttgcatttctgtaaaacttctacaacttctggtgtcagaactgtccagaagatggtactgttaactgttatttcctttgatgttttgattttgaagtttagctctcatgcaaatgtttcaggcgtacatacataggcagaaagcaatttttaggtgatttgtctgtttcttggatgaaatataaagcaagctttaatgttctgacttgttcatttgaaatacaaaaaagtaagtgaattttaatgttttgcattaactaaagaaatctgaagattaatgttgaggaaattgtatggacatgcctttgtgaaaccaggaagtattttaagttaaaaatgaaaaaggttttaattgctttgtgtgtgttttaatggagccccattttagaattattttttccatctccctttaccaacaaaaggaacaatgccaccgtgaatggaatagtttggggaaagctttgccaaacacaaccctgatttcagagcaggaacatggtttggatagatcttcagttccgcttgaattattctgttactgcgctgtcattttcagaagatttccattcctttgcagatgctgttgggagttcgggattatgttcatttcttctgttttaatggcattcagtactaattttataagtgcatcttgtgtgaatctcaataaattcagttttgtaatcttttttaaaaaggtcactgaatttattttaatatttactattgtatttggtagagtgaatttcccactgtataataagtatttatttgtaattcacaagtgatagagctatcttaatttgaattattgctttggtcttaatggtggcaaaatgtttaattttgtctttggaaaaaataggctcggccttgattatagaccatttaatatttctcagcaaatgaaggtatttgcattttacaagtgttttgaatgtcacacaaaatatttttcacatctgggagtcaagttcaagacagtgctttggttttaaaaaaatctaatgaaggcacaggataggccagacccttattaggttttcctttagaataagtgtaaagaccaagtgtcactgatacgcttgtccagattttcttgtggactttggccagtatttagagtttatattcatgttacataaagtgaaagaaacttgctataattaggccatcaaaatatatcctgccactcctggtaactcagcagaggaggagataaatttacaaaataatgtaatatctctacattgttacatgttttcaactattttttatcaacaaagatttgttaatcacttcctatgtgtcagaaactgttctaagtggtgggatcagcaatgagcaagataagtccctgttcgtctgtggaagactgataggaacaagtcgatgaaataatgtctgctggtcacagagtgtccactgaccaaatgatctctcaggcttatttcagctctaaaatatagttctttaaaacgtt

SEQ ID NO: 855 - DNA, 4648 bp, Homo sapiens; identical to SEQ ID NO: 854
  misc_feature (1455)..(1455): second gene starts at position 1455

SEQ ID NO: 856 - DNA, 4648 bp, Homo sapiens; identical to SEQ ID NO: 854
  misc_feature (1455)..(1455): second gene starts at position 1455

SEQ ID NO: 857 - DNA, 4621 bp, Homo sapiens
  misc_feature (1428)..(1428): second gene starts at position 1428
atggccctcgtactcggctccctgttgctgctggggctgtgcgggaactccttttcaggagggcagccttcatccacagatgctcctaaggcttggaattatgaattgcctgcaacaaattatgagacccaagactcccataaagctggacccattggcattctctttgaactagtgcatatctttctctatgtggtacagccgcgtgatttcccagaagatactttgagaaaattcttacagaaggcatatgaatccaaaattgattatgacaagattgtctactatgaagcagggattattctatgctgtgtcctggggctgctgtttattattctgatgcctctggtggggtatttcttttgtatgtgtcgttgctgtaacaaatgtggtggagaaatgcaccagcgacagaaggaaaatgggcccttcctgaggaaatgctttgcaatctccctgttggtgatttgtataataataagcattggcatcttctatggttttgtggcaaatcaccaggtaagaacccggatcaaaaggagtcggaaactggcagatagcaatttcaaggacttgcgaactctcttgaatgaaactccagagcaaatcaaatatatattggcccagtacaacactaccaaggacaaggcgttcacagatctgaacagtatcaattcagtgctaggaggcggaattcttgaccgactgagacccaacatcatccctgttcttgatgagattaagtccatggcaacagcgatcaaggagaccaaagaggcgttggagaacatgaacagcaccttgaagagcttgcaccaacaaagtacacagcttagcagcagtctgaccagcgtgaaaactagcctgcggtcatctctcaatgaccctctgtgcttggtgcatccatcaagtgaaacctgcaacagcatcagattgtctctaagccagctgaatagcaaccctgaactgaggcagcttccacccgtggatgcagaacttgacaacgttaataacgttcttaggacagatttggatggcctggtccaacagggctatcaatcccttaatgatatacctgacagagtacaacgccaaaccacgactgtcgtagcaggtatcaaaagggtcttgaattccattggttcagatatcgacaatgtaactcagcgtcttcctattcaggatatactctcagcattctctgtttatgttaataacactgaaagttacatccacagaaatttacctacattggaagagtatgattcatactggtggctgggtggcctggtcatctgctctctgctgaccctcatcgtgattttttactacctgggcttactgtgtggcgtgtgcggctatgacaggcatgccaccccgaccacccgaggctgtgtctccaacaccggaggcgtcttcctcatggtgttgatatccctgaaagtacttaatagcatcgtgctgttggggaaatcgtgccagtatgtgaaggaagccaaaatggaagagaagctgtcgaatcctcccgcaacctgcactccaggcaagccgtccagtaaatcacagaacaaatgtaaaccctctcaaggcctttccacagaagaaaacctgtctgcctccatcaccaaacaacctattcatcaaaaggaaaatatcataccattacttgtgacaagcaattctgatcagtttttgacaactccagatggtgacgagaaggacataacgcaggacaattctgaattaaaacacagatcctcaaagaaagatttgttagagatagacaggttcacaatttgtggaaaccgaattgactgaatctgtggcttcatgcgctgaagaagctgggtcctggggcaacaagtgctgtgttgccaggacaaatagatgctaaacatggcacttaaatatttatttaaaaacttaaattattattggcaagcaaatcttagtatctttcttccagtaatatggcctggctgagggtcagaccacaggacaggagcgacctccggccttgactgtctgggaagcttgatggattataaaacttcctcctgcctggccaagcagcagcatcatttccaggacccaacaaaggcaacatcaaaatctgttttgctttgtcagtctgggcttccagaatgttgaatttgcctcaaggcctcttcagtataaggaaatacctggaaaactgtgaaacttttaccacgacgtaatctttccagtctcatactattttcacaaacagttttcaaacgttacttcatctgccaaagcattaaaaaaattaaacataagtcaagataaatgttcttaccaccagaataacccttaaagatgtatcttaattaatcagaataaaaggctaccttaaataagacatgatgaatagtagcattttgtagggttaaaaaaaaatgctaaactagtttatttattaaaaaaataattaatgaaggctatgcattactgggaaaaatccttcataatttttcagtttactctttaaagcaaaatgtgagctgtatgtcatttaattggtggataaaacaaatttccttacaaaagggcactttttacaccaaggaagcagagcagtgttaactttaaggtatacttaactgattttgctttaaaactaattacttcataaattattacagctaaaaggattcgatgttgaacaggctgaaaaattgtcaatgtacaaaattcaaaactgtcaactttaactgtaaagtaaatgctccaagtgtgttagacagcatcatcttgcttgggcttaccaaatgcattagtctttgtgtttgggtcgacagcgagtgtgcctgtgctggggcagggtgtgtgttctgtgggagggtgtctgtggggatgtgactatcagggtgggcctgtgctggggatggggcaggcctgggtctggagaggattttgtgtgaaagtaaatggggtgtttgaggcgtatgggtggctgttggtgtggggaggcatctgtgtatggctgttgggaacagcaaccaaaaggtgctttttggttttatttgagatgaagattgtgtttccgcttaattactagtttgtggtctatatcatagaagttatttcccaccccattttatcttgacaaccgtgtttgcatttctgtaaaacttctacaacttctggtgtcagaactgtccagaagatggtactgttaactgttatttcctttgatgttttgattttgaagtttagctctcatgcaaatgtttcaggcgtacatacataggcagaaagcaatttttaggtgatttgtctgtttcttggatgaaatataaagcaagctttaatgttctgacttgttcatttgaaatacaaaaaagtaagtgaattttaatgttttgcattaactaaagaaatctgaagattaatgttgaggaaattgtatggacatgcctttgtgaaaccaggaagtattttaagttaaaaatgaaaaaggttttaattgctttgtgtgtgttttaatggagccccattttagaattattttttccatctccctttaccaacaaaaggaacaatgccaccgtgaatggaatagtttggggaaagctttgccaaacacaaccctgatttcagagcaggaacatggtttggatagatcttcagttccgcttgaattattctgttactgcgctgtcattttcagaagatttccattcctttgcagatgctgttgggagttcgggattatgttcatttcttctgttttaatggcattcagtactaattttataagtgcatcttgtgtgaatctcaataaattcagttttgtaatcttttttaaaaaggtcactgaatttattttaatatttactattgtatttggtagagtgaatttcccactgtataataagtatttatttgtaattcacaagtgatagagctatcttaatttgaattattgctttggtcttaatggtggcaaaatgtttaattttgtctttggaaaaaataggctcggccttgattatagaccatttaatatttctcagcaaatgaaggtatttgcattttacaagtgttttgaatgtcacacaaaatatttttcacatctgggagtcaagttcaagacagtgctttggttttaaaaaaatctaatgaaggcacaggataggccagacccttattaggttttcctttagaataagtgtaaagaccaagtgtcactgatacgcttgtccagattttcttgtggactttggccagtatttagagtttatattcatgttacataaagtgaaagaaacttgctataattaggccatcaaaatatatcctgccactcctggtaactcagcagaggaggagataaatttacaaaataatgtaatatctctacattgttacatgttttcaactattttttatcaacaaagatttgttaatcacttcctatgtgtcagaaactgttctaagtggtgggatcagcaatgagcaagataagtccctgttcgtctgtggaagactgataggaacaagtcgatgaaataatgtctgctggtcacagagtgtccactgaccaaatgatctctcaggcttatttcagctctaaaatatagttctttaaaacgtt

SEQ ID NO: 858 - DNA, 4621 bp, Homo sapiens; identical to SEQ ID NO: 857
  misc_feature (1428)..(1428): second gene starts at position 1428

SEQ ID NO: 859 - DNA, 4621 bp, Homo sapiens; identical to SEQ ID NO: 857
  misc_feature (1428)..(1428): second gene starts at position 1428

SEQ ID NO: 860 - DNA, 4621 bp, Homo sapiens; identical to SEQ ID NO: 857
  misc_feature (1428)..(1428): second gene starts at position 1428

SEQ ID NO: 861 - DNA, 4120 bp, Homo sapiens
  misc_feature (126)..(126): second gene starts at position 126
atgcccaggaagaaggcggcggcggcggcctgggaggagccgagctcgggcaacggcactgcccgcgccgggcccaggaaacgcggcggcccggcgggcaggaagcgcgagcggcccgagcgctggccgccgccgctgctgctgctcgccccgtcgttacaccaacccgaggctctttgtttcccctcttggatctgttgagtttctttgttgaagaagccagcatgggtgcccagttctccaagaccgcagcgaagggagaagccgccgcggagaggcctggggaggcggctgtggcctcgtcgccttccaaagcgaacggacaggagaatggccacgtgaaggtaaacggcgacgcttcgcccgcggccgccgagtcgggcgccaaggaggagctgcaggccaacggcagcgccccggccgccgacaaggaggagcccgcggccgccgggagcggggcggcgtcgccctccgcggccgagaaaggtgagccggccgccgccgctgcccccgaggccggggccagcccggtagagaaggaggcccccgcggaaggcgaggctgccgagcccggctcgcccacggccgcggagggagaggccgcgtcggccgcctcctcgacttcttcgcccaaggccgaggacggggccacgccctcgcccagcaacgagaccccgaaaaaaaaaaagaagcgcttttccttcaagaagtctttcaagctgagcggcttctccttcaagaagaacaagaaggaggctggagaaggcggtgaggctgaggcgcccgctgccgaaggcggcaaggacgaggccgccgggggcgcagctgcggccgccgccgaggcgggcgcggcctccggggagcaggcagcggcgccgggcgaggaggcggcagcgggcgaggagggggcggcgggtggcgacccgcaggaggccaagccccaggaggccgctgtcgcgccagagaagccgcccgccagcgacgagaccaaggccgccgaggagcccagcaaggtggaggagaaaaaggccgaggaggccggggccagcgccgccgcctgcgaggccccctccgccgccgggcccggcgcgcccccggagcaggaggcagcccccgcggaggagcccgcggccgccgcagcctcgtcagcctgcgcagccccctcacaggaggcccagcccgagtgcagtccagaagcccccccagcggaggcggcagagtaaaagagcaagcttttgtgagataatcgaagaacttttctcccccgtttgtttgttggagtggtgccaggtactggttttggagaacttgtctacaaccagggattgattttaaagatgtctttttttattttacttttttttaagcaccaaattttgttgttttttttttttctcccctccccacagatcccatctcaaatcattctgttaaccaccattccaacaggtcgaggagagcttaaacaccttcttcctctgccttgtttctcttttattttttattttttcgcatcagtattaatgtttttgcatactttgcatctttattcaaaagtgtaaactttctttgtcaatctatggacatgcccatatatgaaggagatgggtgggtcaaaaagggatatcaaatgaagtgataggggtcacaatggggaaattgaagtggtgcataacattgccaaaatagtgtgccactagaaatggtgtaaaggctgtcttttttttttttttttaaagaaaagttattaccatgtattttgtgaggcaggtttacaacactacaagtcttgagttaagaaggaaagaggaaaaaagaaaaaacaccaatacccagatttaaaaaaaaaaaaacgatcatagtcttaggagttcatttaaaccataggaacttttcacttatctcatgttagctgtaccagtcagtgattaagtagaactacaagttgtataggctttattgtttattgctggtttatgaccttaataaagtgtaattatgtattaccagcagggtgtttttaactgtgactattgtataaaaacaaatcttgatatccagaagcacatgaagtttgcaactttccaccctgcccatttttgtaaaactgcagtcatcttggaccttttaaaacacaaattttaaactcaaccaagctgtgataagtggaatggttactgtttatactgtggtatgtttttgattacagcagataatgctttcttttccagtcgtctttgagaataaaggaaaaaaaaatcttcagatgcaatggttttgtgtagcatcttgtctatcatgttttgtaaatactggagaagctttgaccaatttgacttagagatggaatgtaactttgcttacaaaaattgctattaaactcctgcttaaggtgttctaattttctgtgagcacactaaaagcgaaaaataaatgtgaataaaatgtacaaatttgttgtgtttttttatgttctaataatactgagacttctaggtcttaggttaatttttaggaagatcttgcatgccatcaggagtaaattttattgtggttcttaatctgaagttttcaagctctgaaattcataatccgcagtgtcagattacgtagaggaagatcttacaacattccatgtcaaatctgttaccatttattggcatttagttttcatttaagaattgaacataattatttttattgtagctatatagcatgtcagattaaatcatttacaacaaaaggggtgtgaacctaagactatttaaatgtcttatgagaaaatttcataaagccattctcttgtcattcaggtccagaaacaaattttaaactgagtgagagtctatagaatccatactgcagatgggtcatgaaatgtgaccaaatgtgtttcaaaaattgatggtgtattacctgctattgtaattgcttagtgcttggctaatttccaaattattgcataatatgttctaccttaagaaaacaggtttatgtaacaaagtaatggtgttgaatggatgatgtcagttcatgggcctttagcatagttttaagcatcatttttttttttttttttgaaagtgtgttagcatcttgttactcaaaggataagacagacaataatacttcactgaatattaataatctttactagtttacctcctctgctctttgccacccgataactggatatcttttccttcaaaggaccctaaactgattgaaatttaagatatgtatcaaaaacattatttcatttaatgcacatctgttttgctgtttttgagcagtgtgcagtttagggttcatgataaatcattgaaccacatgtgtaacaactgaatgccaaatcttaaactcattagaaaaataacaaattaggttttgacacgcattcttaattggaataatggatcaaaaatagtggttcatgaccttaccaaacacccttgctactaataaaatcaaataacacttagaagggtatgtatttttagttagggtttcttgatcttggaggatgtttgaaagttaaaaattgaatttggtaaccaaaggactgatttatgggtctttcctatcttaaccaacgttttcttagttacctagatggccaagtacagtgcctggtatgtagtaagactcagtaaaaaagtggatttttaaaaataactcccaaagtgaatagtcaaaaatcctgttagcaaactgttatatattgctaagtttgttcttttaacagctggaatttattaagatgcattattttgattttattcactgcctaaaacactttgggtggtattgatggagttggtggattttcctccaagtgattaaatgaaatttgacgtatcttttcatccaaagttttgtacatcatgttttctaacggaaaaaaatgttaatatggcttttttgtattactaaaaatagctttgagattaaggaaaaataaataactcttgtacagttcagtattgtctattaaatctgtattggcagtatgtataatggcatttgctgtggttacaaaatacttcctctgggttataataatcatttgatccaattcctattgcttgtaaaataaagttttaccagttgatataatcaa

SEQ ID NO: 862 - DNA, 2059 bp, Homo sapiens
  misc_feature (509)..(509): second gene starts at position 509
atgggccgtgtgatccgtggacagaggaagggcgccgggtctgtgttccgcgcgcacgtgaagcaccgtaaaggcgctgcgcgcctgcgcgccgtggatttcgctgagcggcacggctacatcaagggcatcgtcaaggacatcatccacgacccgggccgcggcgcgcccctcgccaaggtggtcttccgggatccgtatcggtttaagaagcggacggagctgttcattgccgccgagggcattcacacgggccagtttgtgtattgcggcaagaaggcccagctcaacattggcaatgtgctccctgtgggcaccatgcctgagggtacaatcgtgtgctgcctggaggagaagcctggagaccgtggcaagctggcccgggcatcagggaactatgccaccgttatctcccacaaccctgagaccaagaagacccgtgtgaagctgccctccggctccaagaaggttatctcctcagccaacagagctgtggttggtgtggtggccacctccagcaaaaaccttgagcccctctttgagacctacctcagtgtcctgaggaagcagctagataccttgggcaatgacaaagggcgcctgcagtctgagctgaagaccatgcaggacagcgtggaggacttcaagactaagtatgaagaggagatcaacaaacgcacagcagccgagaatgactttgtggtcctaaagaaggacgtggatgctgcctacctgaacaaggtggagttggaggccaaggtggacagtcttaatgacgagatcaacttcctgaaggtcctctatgatgcggagctgtcccagatgcagacccatgtcagcgacacgtccgtggtcctttccatggacaacaaccgcaacctggacctggacagcattattgccgaggtccgtgcccagtacgaggagattgcccagaggagcaaggctgaggctgaagccctgtaccagaccaaggtccagcagctccagatctcggttgaccaacatggtgacaacctgaagaacaccaagagtgaaattgcagagctcaacaggatgatccagaggctgcgggcagagatcgagaacatcaagaagcagtgccagactcttcaggtatccgtggctgatgcagagcagcgaggtgagaatgcccttaaagatgcccacagcaagcgcgtagagctggaggctgccctgcagcaggccaaggaggagctggcacgaatgctgcgtgagtaccaggagctcatgagtgtgaagctggccttggacatcgagatcgccacctaccgcaaactgctggagggcgaggagtacagaatgtctggagaatgccagagtgccgtgagcatctctgtggtcagcggtagcaccagcactggaggcatcagcggaggattaggaagtggctccgggtttggcctgagtagtggctttggctccggctctggaagtggctttgggtttggtggcagtgtctctggcagttccagcagcaagatcatctctaccaccaccctgaacaagagacgatagaggagacgaggtccctgcagctcactgtgtccagctgggcccagcactggtgtctctgtgcttccttcacttcacctccatcctctgtctctggggctcatcttactagtatcccctccactatcccatgggctctctctgccccaggatgatcttctgtgctgggacagggactctgcctcttggagtttggtagctacttcttgatttgggcctggtgacccacctggaatgggaaggatgtcagctgacctctcacctcccatggacagagaagaaaatgaccaggagtgtcatctccagaattattggggtcacatatgtcccttcccagtccaatgccatctcccactagatcctgtattatccatctacatcagaaccaaactacttctccaacacccggcagcacttggccctgcaagcttaggatgagaaccacttagtgtcccattctactcctctcattccctcttatccatctgcaggtgaatcttcaataaaatgcttttgtcattca

SEQ ID NO: 863 - DNA, 2059 bp, Homo sapiens; identical to SEQ ID NO: 862
  misc_feature (509)..(509): second gene starts at position 509

SEQ ID NO: 864 - DNA, 3299 bp, Homo sapiens
  misc_feature (484)..(484): second gene starts at position 484
atggaggaggagggtgtgaaggaagccggtgagaagcctcggggagcacagatggtggacaaggctggctggatcaagaagagcagtgggggcctcctgggtttctggaaagaccgatatctgctcctctgccaggcccagctgctggtctatgagaatgaggatgatcagaagtgtgtggagactgtggagctgggcagctatgagaagtgccaggaccttcgtgccctcctcaagcgaaaacaccgctttatcctgctgcgatccccagggaacaaggtcagcgacatcaaattccaggcacccaccggggaggagaaggaatcctggatcaaagccctcaatgaagggattaaccgaggcaaaaacaaggctttcgatgaggtaaaggtggacaagagctgcgccctggagcatgtgacacgggaccgggtgcgagggggccagcgacgccggccaccaacgagagtccacctgaaggagtttgggatgaatgcgcttctcctgtctgcctggttcggccacttacgaatcctccagatcttggtaaactcaggggccaagatccactgtgagagcaaggatggcctgaccttactgcactgcgcagcccaaaaaggccatgtgcctgtgctggcgttcataatggaggacctggaggatgtggccctggaccacgtagacaagctggggaggacggcgtttcacagggcagctgagcacgggcagctggatgctctggacttcctcgtgggctctggctgtgaccacaatgtcaaagacaaggaggggaacactgcccttcatctggctgctggtcggggccatatggctgtgctgcagcgacttgtggacatcgggctggacctggaggagcagaatgcggaaggtctgactgccctgcattcggctgctggaggatcccaccctgactgtgtgcagctcctcctcagggctgggagcaccgtgaatgccctcacccagaaaaacctaagctgccttcactatgcagccctcagtggctcggaggatgtgtctcgggtcctcatccacgcaggaggctgcgccaacgtggttgatcatcagggtgcctctcctctgcacctcgctgtgaggcacaacttccctgccttggtccggctcctcatcaactccgacagtgacgtgaatgccgtggacaataggcagcagacgccccttcacctggctgcagagcacgcctggcaggacatagcagatatgctcctcattgctggggttgacttaaacctgagagataagcagggaaaaaccgccctggcagtggctgtccgcagcaaccatgtcagcctggtggacatgatcataaaagctgatcgtttctacagatgggagaaggaccaccccagtgatccctctgggaagagcttgtcctttaagcaggaccatcggcaggaaacacagcagctccgttctgtgctgtggcggctggcctccaggtatctgcagccccgtgagtggaagaagctggcatattcctgggagttcacggaggcacatgtcgacgccatcgagcaacagtggacaggcaccaggagctatcaggagcacggccaccgaatgctgctcatttggctgcatggcgtggccacggctggtgagaaccccagcaaagcgctgttcgagggcctcgtggccattggcaggagggacctggctggctggagtacaatggcgagatctcagctcacggcaacctccgcctcccgggttcaaatgattctcgtgcctcagcctcccgagtagctgggattacaggtgcatgccatcacagctggctaatttttgtatttttagtagagatggggtttggccatgatggccaggctggaaaattgaaacataatttcacaattattcctttttccaccttaaataataagagtagaatactttctgtgtttttatcttatacacatgaataaatgctatggcttatcacagttacaatgtgttttctgaaagtaaagattattttaccttgaaattacaaaaattattttcagttttccaaaattctatcatctttaaacctaaataattcaatttcatggatgcacaaatgtttattgagagtctcatattcatgcttttcttcacagcactataaagttggacttggaaaatttggacagccatttgccattgtaatttttattcttttttctcctgattatttgacaaaacttgtatccacattgtagctgttcatgtgtctgcttctattgcatattgtaaaattattaactacttcccaaaatagtatttctctcagcagatatttctttggtactaccatgtattgtgtaacttttgggaaagtaaggtggcttccctgctctcagtgaagcattttattaaaagaataattataattaaaaaaacacgatacagatcagtgcatatagtatattactaatagtatgctgttaattgtgtaagaaagaaaggaaattagaaaacatatttgcataaataaaagctagacaaaggctaagaaactaatcaggtggtttccctggggtagtaggataatggggaacagtggggctgggaccgggtgggagaaagagttctcagtggttcctttctatacagttttaacttttgaaatgtgtgagagtgttacttactgaaaactgaaaggatatgacatgctggaacaggcaaaactacaaagacagtaaaaagatcagtgatttccaggagctgcaagggcagtgagaggaagggagggatgaggaggtggagtgcaggggatgttagggcagtgaaaggttctgtatgacactgtgatggtgggtacatgacattgggcattggtcaaaacccatagcatgtacagcacaaagcgtttgctctaatgtgagctatggactttagttaatagtaacgtgtcaatattggttcatcagttgtatcaaatgtaccacactgatgccagatgttaataatcggggaaactgtgtgtgctgaagagtacgtgggagctctctgtgctatctgctcaatttttctctaaacctaaaactgttctaaaatagaaagtctgtgaaaaaaaacaaaagtaaagttataaaaggaaaagaaaacagaggctttaaattaaatcatctattccttgggaaaggtattttgtaccatatgggactgaaatcatttctctggatgaattttataaaatgaattttgtaatttttttctgagaaaaaaaagttcttaaatacaataaaattgaaatgttgaaatatatctctcaa

SEQ ID NO: 865 - DNA, 3149 bp, Homo sapiens
  misc_feature (334)..(334): second gene starts at position 334
atggaggaggaggatgatcagaagtgtgtggagactgtggagctgggcagctatgagaagtgccaggaccttcgtgccctcctcaagcgaaaacaccgctttatcctgctgcgatccccagggaacaaggtcagcgacatcaaattccaggcacccaccggggaggagaaggaatcctggatcaaagccctcaatgaagggattaaccgaggcaaaaacaaggctttcgatgaggtaaaggtggacaagagctgcgccctggagcatgtgacacgggaccgggtgcgagggggccagcgacgccggccaccaacgagagtccacctgaaggagtttgggatgaatgcgcttctcctgtctgcctggttcggccacttacgaatcctccagatcttggtaaactcaggggccaagatccactgtgagagcaaggatggcctgaccttactgcactgcgcagcccaaaaaggccatgtgcctgtgctggcgttcataatggaggacctggaggatgtggccctggaccacgtagacaagctggggaggacggcgtttcacagggcagctgagcacgggcagctggatgctctggacttcctcgtgggctctggctgtgaccacaatgtcaaagacaaggaggggaacactgcccttcatctggctgctggtcggggccatatggctgtgctgcagcgacttgtggacatcgggctggacctggaggagcagaatgcggaaggtctgactgccctgcattcggctgctggaggatcccaccctgactgtgtgcagctcctcctcagggctgggagcaccgtgaatgccctcacccagaaaaacctaagctgccttcactatgcagccctcagtggctcggaggatgtgtctcgggtcctcatccacgcaggaggctgcgccaacgtggttgatcatcagggtgcctctcctctgcacctcgctgtgaggcacaacttccctgccttggtccggctcctcatcaactccgacagtgacgtgaatgccgtggacaataggcagcagacgccccttcacctggctgcagagcacgcctggcaggacatagcagatatgctcctcattgctggggttgacttaaacctgagagataagcagggaaaaaccgccctggcagtggctgtccgcagcaaccatgtcagcctggtggacatgatcataaaagctgatcgtttctacagatgggagaaggaccaccccagtgatccctctgggaagagcttgtcctttaagcaggaccatcggcaggaaacacagcagctccgttctgtgctgtggcggctggcctccaggtatctgcagccccgtgagtggaagaagctggcatattcctgggagttcacggaggcacatgtcgacgccatcgagcaacagtggacaggcaccaggagctatcaggagcacggccaccgaatgctgctcatttggctgcatggcgtggccacggctggtgagaaccccagcaaagcgctgttcgagggcctcgtggccattggcaggagggacctggctggctggagtacaatggcgagatctcagctcacggcaacctccgcctcccgggttcaaatgattctcgtgcctcagcctcccgagtagctgggattacaggtgcatgccatcacagctggctaatttttgtatttttagtagagatggggtttggccatgatggccaggctggaaaattgaaacataatttcacaattattcctttttccaccttaaataataagagtagaatactttctgtgtttttatcttatacacatgaataaatgctatggcttatcacagttacaatgtgttttctgaaagtaaagattattttaccttgaaattacaaaaattattttcagttttccaaaattctatcatctttaaacctaaataattcaatttcatggatgcacaaatgtttattgagagtctcatattcatgcttttcttcacagcactataaagttggacttggaaaatttggacagccatttgccattgtaatttttattcttttttctcctgattatttgacaaaacttgtatccacattgtagctgttcatgtgtctgcttctattgcatattgtaaaattattaactacttcccaaaatagtatttctctcagcagatatttctttggtactaccatgtattgtgtaacttttgggaaagtaaggtggcttccctgctctcagtgaagcattttattaaaagaataattataattaaaaaaacacgatacagatcagtgcatatagtatattactaatagtatgctgttaattgtgtaagaaagaaaggaaattagaaaacatatttgcataaataaaagctagacaaaggctaagaaactaatcaggtggtttccctggggtagtaggataatggggaacagtggggctgggaccgggtgggagaaagagttctcagtggttcctttctatacagttttaacttttgaaatgtgtgagagtgttacttactgaaaactgaaaggatatgacatgctggaacaggcaaaactacaaagacagtaaaaagatcagtgatttccaggagctgcaagggcagtgagaggaagggagggatgaggaggtggagtgcaggggatgttagggcagtgaaaggttctgtatgacactgtgatggtgggtacatgacattgggcattggtcaaaacccatagcatgtacagcacaaagcgtttgctctaatgtgagctatggactttagttaatagtaacgtgtcaatattggttcatcagttgtatcaaatgtaccacactgatgccagatgttaataatcggggaaactgtgtgtgctgaagagtacgtgggagctctctgtgctatctgctcaatttttctctaaacctaaaactgttctaaaatagaaagtctgtgaaaaaaaacaaaagtaaagttataaaaggaaaagaaaacagaggctttaaattaaatcatctattccttgggaaaggtattttgtaccatatgggactgaaatcatttctctggatgaattttataaaatgaattttgtaatttttttctgagaaaaaaaagttcttaaatacaataaaattgaaatgttgaaatatatctctcaa

SEQ ID NO: 866 - DNA, 3299 bp, Homo sapiens; identical to SEQ ID NO: 864
  misc_feature (484)..(484): second gene starts at position 484

SEQ ID NO: 867 - DNA, 3149 bp, Homo sapiens; identical to SEQ ID NO: 865
  misc_feature (334)..(334): second gene starts at position 334

SEQ ID NO: 868 - DNA, 4636 bp, Homo sapiens
  misc_feature (2445)..(2445): second gene starts at position 2445
atggggtcgcagacgctgcagatcctccgacagggggtgtgggccgcgctcagcgggggctggtactacgacccgcaccaggccaccttcgtgaacgcgctgcacctctacctgtggctctttctgctgggcctgcccttcaccctctacatggcccttccttctaccatgattatagtagcagtttattgtcctgtgatagctgctgttttcattgttctgaagatggtcaactatcgactacacagagcacttgatgctggagaagttgtagataggactgcaaatgagttcacggatcagcgaaccaaagctgaacaaggcaactgttcaaccaggagaaaagacagcaatggaccgagtgatcctggtggagggattgaaatgtctgagttcatccgagaggccacacccccagttggttgcagttccagaaattcttatgccggtctagatccaagcaaccagattggatctggttcctcgcgtcttggaacagcagcaactattaaaggagatacagacactgctaagacttctgatgatatcagtttaagtctgggccaaagttctagtctttgtaaggaaggaagtgaagaacaagatttggcagctgatcggaagctctttcgtcttgtctccaatgactccttcatctctattcagccttccttatcctcttgtggacaggacttgccaagggacttcagtgacaaagtgaacctgccaagtcataaccaccaccaccatgttgatcagtctctgtccagcgcctgtgacacagaagtagcttctcttgtacctttacactcacactcttatagaaaagaccaccggccgcgaggtgtaccacggacttctagctctgctgtggcttttccagacacttcactgaatgattttcccctttatcagcaaagacgtggattagatccagttagtgagttagaatcttccaagcctctttctggatccaaagaatccttggtggaaaattctggtttatctggggaatttcagcttgctggtgacttgaaaatcaatacttctcagccacccacaaaaagtgggaagagcaaacctttgaaagcagagaaaagcatggacagcttgaggagcctgagcacacggagtagtgggtcaacagaaagctactgcagtggaacggaccgggacactaacagtactgtcagcagctataaaagtgagcagaccagctcaactcacatagagagcatcctgtcagagcatgaggagtctcctaaagcaggaacaaaaagtgggaggaagaaagagtgctgtgcaggcccagaggagaagaatagctgtgccagtgacaaaaggactagcagtgaaaagattgctatggaagcgagtaccaacagtggggttcacgaggccaaggaccccaccccctctgatgagatgcacaaccagagaggtctcagcacctctgcatctgaagaagccaataaaaatccccatgcaaatgaatttacttcccaaggggacagaccacctgggaacactgcagaaaacaaagaagagaagagtgataagtcagctgtttctgtggattccaaagtgcgtaaagatgttggtggaaagcaaaaggaaggggatgttcgacctaaatcttctagcgtaatccatcggacagcttctgcccacaagtcaggcaggagacgcacaggaaaaaaacgggctagcagttttgattcaagccggcatagggactatgtttgctttcgaggtgtttctggtaccaagccacacagtgctatattttgtcatgacgaagactctagtgatcagagtgacttgagtagagcatcaagtgttcagtctgctcaccagttcagcagtgatagctcttctagcaccacttctcattcctgtcagtctcctgagggcagatacagtgctctaaagaccaaacacactcataaagaaaggggcacagactctgaacacacacacaaagctcatttggttcctgaaggaaccagcaaaaagcgtgcaacacgacggacttctagcacaaatagtgccaagactcgtgcccgagtgttgagcctggacagtggcacagtagcatgtttgaatgactcaaacaggttaatggcacctgaaagtataaagcccttaaccacttcaaaatcagatcttgaggccaaagagggagaggtgctagatgagctatctttattaggacgggcttcccagttagagacagtcactcgatctaggaatagcttgccaaaccaggttgcatttcctgaaggggaagagcaagatgcagtcagtggagcagcacaagccagcgaggaggcagtgtcatttcgccgtgaacgcagcacatttaggcgccaggcagtacggcgccggcacaatgcagggagtaaccctacccctcctacattgctcatcggatcacccctaaggtaaagaagcagctttgaatctgagcttcatatcgaaagaagagatgaaaaataccagttggattagaaagaactggcttcttgtagctgggatatctttcataggtgtccatcttggaacatactttttgcagaggtctgcaaagcagtctgtaaaatttcagtctcaaagcaaacaaaagagtattgaagagtgaagtaaaataaatatttggaattactaatttgtcattaaatcattctatgctgattagcttcataaacattgaactttttgattttatagccacaatgctgcatattcatactttaattcctaaagaataatttttaatgttaaaacgtgataatgcaataaatagaaaaatgtggtttacaaaataaaaacggtcttcactagttaccacctgaagtaagatgtctcgtttggaagctaagaagccatcattgtgtaagagtgaaccactgacaactgagagagtcaggaccacactttctgtcttgaaaagaattgtaacatcatgctatggcccctcaggtaggctgaagcagctgcacaatggctttggaggttacgtgtgtacaacctcacagtcctcagctctgctcagtcaccttttggtcacacatcccattttaaagatcctgacagcctccatacagaatcatgtgtcaagcttcagtgattgtggcttattcacagctattctttgctgcaacctgattgaaaatgttcagagattaggcttgacacccaccactgtcattagattaaataaacatcttttgagtctttgcatcagttatctcaagtctgagacctgtggttgtcgaatcccagtggactttagtagtactcagatcctcctttgtttggtgcgtagtatattaacaagtaaacctgcctgtatgctcaccagaaaggaaacagagcatgtcagtgctttgatcctgagagcctttttgcttacaattccagaaaatgctgaaggccacatcattttaggaaagagtttaattgtacctttaaaaggtcaaagagttatagattccactgtattacctgggatactcattgaaatgtcagaagttcaattaatgaggctattacctatcaaaaaatcaactgccctcaaggtggcactcttttgtacaactttatccggagacacttctgacactggagaaggaactgtggtggtcagttatggggtttctcttgaaaatgcagtcttggaccagctgcttaacctaggaaggcagctaatcagtgaccacgtagatcttgtcctgtgccaaaaagttatacatccatctttgaagcagtttctcaatatgcatcgtattattgccatagacagaattggagtgactctgatggaacccctgactaaaatgacaggaacacagcctattggatccctaggctcaatatgtcctaatagttatggaagtgtgaaagatgtgtgcactgcaaaatttggctccaaacatttttttcatcttattcctaatgaagcaacaatctgcagcttgcttctctgcaacagaaatgacactgcctgggatgagctgaagctcacgtgtcagacggcactgcatgtcctgcagttaacactcaaggaaccatgggctttgttgggaggtggctgtactgaaactcatttggctgcatatatcagacacaagactcacaacgacccagaaagcattctcaaagatgatgaatgtactcaaacagaacttcaattaattgctgaagcattttgcagtgccctagaatctgttgttggctctttagaacatgatggaggtgaaattctcactgacatgaagtatggacacctttggtcagttcaggcagattctccctgtgttgctaactggccagatttgctttcacagtgtggctgtggattatacaatagccaggaagaactcaactggtctttcttaagaagcacacgtcgtccatttgtgccacaaagctgccttccacatgaagctgtgggctcagccagcaacctgaccttggactgtttgactgcaaagcttagtggcctacaggtggctgtagagacagccaatttgattttggatctttcatatgttattgaagataaaaactaagagaatagcatgttcgtattacaagagaaacaaataaactagtctgttggcaattgagaaaa

SEQ ID NO: 869 - DNA, 4636 bp, Homo sapiens; identical to SEQ ID NO: 868
  misc_feature (2445)..(2445): second gene starts at position 2445

SEQ ID NO: 870 - DNA, 10350 bp, Homo sapiens
  misc_feature (361)..(361): second gene starts at position 361
atgagggcctggatcttctttctcctttgcctggccgggagggccttggcagcccctcagcaagaagccctgcctgatgagacagaggtggtggaagaaactgtggcagaggtgactgaggtatctgtgggagctaatcctgtccaggtggaagtaggagaatttgatgatggtgcagaggaaaccgaagaggaggtggtggcggaaaatccctgccagaaccaccactgcaaacacggcaaggtgtgcgagctggatgagaacaacacccccatgtgcgtgtgccaggaccccaccagctgcccagcccccattggcgagtttgagaaggtgtgcagcaatgacaacaagaccttcgacaatagtgttggtgtcttgaaactgacgtaatgcgcggagactgaggtcctgacaagcgataacatttctgataaagacccgatcttactgcaatctctagcgtcctcttttttggtgctgctggtttctccagacctcgcgtcctctcgattgctctctcgccttcctatttcttttttttttttttaaacaaaaaacaacaccccctcccctctcccacccggcaccgggcacatccttgctctatttcctttctctttctctctctctctctctctctctcttttttaataagggtgggggagggaaaggggggggatgcaggaaagacctttttctctcccccccgcaataatccaagatcaactctgcaaacaacagaagacggttcatggctttggccgccgcgccaccatctttcgggctgccgagggtgttcttgacgattaatcaacagatgtacagatcagctctcaaaatgtcttctgtgtcttctgagcgtcttctaagacaattgcattagcctcctgctagttgactaatagaattaataattgtaaaaagcactctaaagccacatgccttatgaagtcaatgctgggtatgattttacaaatatggtccggaaaaagaacccccctctgagaaacgttgcaagtgaaggcgagggccagatcctggagcctataggtacagaaagcaaggtatctggaaagaacaaagaattttctgcagatcagatgtcagaaaatacggatcagagtgatgctgcagaactaaatcataaggaggaacatagcttgcatgttcaagatccatcttctagcagtaagaaggacttgaaaagcgcagttctgagtgagaaggctggcttcaattatgaaagccccagtaagggaggaaactttccctcctttccgcatgatgaggtgacagacagaaatatgttggctttctcatctccagctgctgggggagtctgtgagcccttgaagtctccgcaaagagcagaggcagatgaccctcaagatatggcctgcaccccctcaggggactcactggagacaaaggaagatcagaagatgtcaccaaaggctacagaggaaacagggcaagcacagagtggtcaagccaattgtcaaggtttgagcccagtttcagtggcctcaaaaaacccacaagtgccttcagatgggggtgtaagactgaataaatccaaaactgacttactggtgaatgacaacccagacccggcacctctgtctccagagcttcaggactttaaatgcaatatctgtggatatggttactacggcaacgaccccacagatctgattaagcacttccgaaagtatcacttaggactgcataaccgcaccaggcaagatgctgagctggacagcaaaatcttggcccttcataacatggtgcagttcagccattccaaagacttccagaaggtcaaccgttctgtgttttctggtgtgctgcaggacatcaattcttcaaggcctgttttactaaatgggacctatgatgtgcaggtgacttcaggtggaacattcattggcattggacggaaaacaccagattgccaagggaacaccaagtatttccgctgtaaattctgcaatttcacttatatgggcaactcatccaccgaattagaacaacattttcttcagactcacccaaacaaaataaaagcttctctcccctcctctgaggttgcaaaaccttcagagaaaaactctaacaagtccatccctgcacttcaatccagtgattctggagacttgggaaaatggcaggacaagataacagtcaaagcaggagatgacactcctgttgggtactcagtgcccataaagcccctcgattcctctagacaaaatggtacagaggccaccagttactactggtgtaaattttgtagtttcagctgtgagtcatctagctcacttaaactgctagaacattatggcaagcagcacggagcagtgcagtcaggcggccttaatccagagttaaatgataagctttccaggggctctgtcattaatcagaatgatctagccaaaagttcagaaggagagacaatgaccaagacagacaagagctcgagtggggctaaaaagaaggacttctccagcaagggagccgaggataatatggtaacgagctataattgtcagttctgtgacttccgatattccaaaagccatggccctgatgtaattgtagtggggccacttctccgtcattatcaacagctccataacattcacaagtgtaccattaaacactgtccattctgtcccagaggactttgcagcccagaaaagcaccttggagaaattacttatccgtttgcttgtagaaaaagtaattgttcccactgtgcactcttgcttctgcacttgtctcctggggcggctggaagctcgcgagtcaaacatcagtgccatcagtgttcattcaccacccctgacgtagatgtactcctctttcactatgaaagtgtgcatgagtcccaagcatcggatgtcaaacaagaagcaaatcacctgcaaggatcggatgggcagcagtctgtcaaggaaagcaaagaacactcatgtaccaaatgtgattttattacccaagtggaagaagagatttcccgacactacaggagagcacacagctgctacaaatgccgtcagtgcagttttacagctgccgatactcagtcactactggagcacttcaacactgttcactgccaggaacaggacatcactacagccaacggcgaagaggacggtcatgccatatccaccatcaaagaggagcccaaaattgacttcagggtctacaatctgctaactccagactctaaaatgggagagccagtttctgagagtgtggtgaagagagagaagctggaagagaaggacgggctcaaagagaaagtttggaccgagagttccagtgatgaccttcgcaatgtgacttggagaggggcagacatcctgcgggggagtccgtcatacacccaagcaagcctggggctgctgacgcctgtgtctggcacccaagagcagacaaagactctaagggatagtcccaatgtggaggccgcccatctggcgcgacctatttatggcttggctgtggaaaccaagggattcctgcagggggcgccagctggcggagagaagtctggggccctcccccagcagtatcctgcatcgggagaaaacaagtccaaggatgaatcccagtccctgttacggaggcgtagaggctccggtgttttttgtgccaattgcctgaccacaaagacctctctctggcgaaagaatgcaaatggcggatatgtatgcaacgcgtgtggcctctaccagaagcttcactcgactcccaggcctttaaacatcattaaacaaaacaacggtgagcagattattaggaggagaacaagaaagcgccttaacccagaggcacttcaggctgagcagctcaacaaacagcagaggggcagcaatgaggagcaagtcaatggaagcccgttagagaggaggtcagaagatcatctaactgaaagtcaccagagagaaattccactccccagcctaagtaaatacgaagcccagggttcattgactaaaagccattctgctcagcagccagtcctggtcagccaaactctggatattcacaaaaggatgcaacctttgcacattcagataaaaagtcctcaggaaagtactggagatccaggaaatagttcatccgtatctgaagggaaaggaagttctgagagaggcagtcctatagaaaagtacatgagacctgcgaaacacccaaattattcaccaccaggcagccctattgaaaagtaccagtacccactttttggacttccctttgtacataatgacttccagagtgaagctgattggctgcggttctggagtaaatataagctctccgttcctgggaatccgcactacttgagtcacgtgcctggcctaccaaatccttgccaaaactatgtgccttatcccaccttcaatctgcctcctcatttttcagctgttggatcagacaatgacattcctctagatttggcgatcaagcattccagacctgggccaactgcaaacggtgcctccaaggagaaaacgaaggcaccaccaaatgtaaaaaatgaaggtcccttgaatgtagtaaaaacagagaaagttgatagaagtactcaagatgaactttcaacaaaatgtgtgcactgtggcattgtctttctggatgaagtgatgtatgctttgcatatgagttgccatggtgacagtggacctttccagtgcagcatatgccagcatctttgcacggacaaatatgacttcacaacacatatccagaggggcctgcataggaacaatgcacaagtggaaaaaaatggaaaacctaaagagtaaaaccttagcacttagcacaattaaatagaaataggttttcttgatgggaattcaatagcttgtaatgtcttatgaagacctattaaaaaaatacttcatagagcctgccttatccaacatgaaattcccttcttttgttattctttcttttgatgagtaggttaccaagattaaaaagtgagataaatggtcaatgagaaagaatggaagatggtaaacaatcactttttaaaacctgttaagtcaaaaccatcttggctaatatgtactggggaaataatccataagagatatcaccagactagaattaatatatttataaagaaagagaccaaaactgtctagaatttgaaagggtttacatattattatactaaagcagtactggactggccattggaccatttgttccaaaacccataaattgttgcctaaatttataatgatcatgaaaccctaggcagaggaggagaaattgaaggtccagggcaatgaaagaaaaatggcgccctctcaatttagtcttctctcattggccatgtttcagattttgacctagaaatgcgagctgtggttaggcttggttagagtgcagcaagcaacatgacagatggtggcacgctgtttttacccagccctgcctgtacatacacatgcacaccctctctgatatttttgtcctttagatgttcaaatactcagtagtccttttgtttgcggtttagattcattttgtccacacatgtacccattttaaaaaacaatgtcctcgatgcttctgtagtgatttcattttagccaggtatttctttcttgtgtgtgatgaaccagtatggatttgcttttctaagcctcctgttggttactaatctcacttggcacattataactaaaggaatcccctcaattcaaaagcatagatggatacaaatgtcagaccgtgggtttaatttgtttagaacacatggcatttcttcacaaggtaacctgctgtatttatttattttcttttggttaaatataatttccaaactttgtggtcaggcagcgtctaaggttacgttaccacagactgacagttggtatatgtaccagccaatcccttcattaaatgtatacagatttagttaagtagcattaaataggattcttagaagtatgtcctcatagaacttttaatacttaaggctttgtaaaaactatccatgaagggaaagctcctcagcataactgctcagggaaatagggctaaataactgaacattaaataattggttaaaggtgctgttagtcgagcctcaatgcttgctacaaggatgtatgtacaaggactgactttaataatttgcattatattgtcccaaccagtagtttattttttgccacggagatgtagaagatattacaagctactggatgcactgtcagattaacttatttcattaaagaagttgggagaacaaataggaaaaaaaaaacttatttttctagtaaatattaatgtattacatttcaaataatggtgcctgacatattgaataattattttctacagtgtacgtatgcaacaaagatattccatcatgcattagagtcagttctggctctgcctagctgtttacatttgcaaatgtagcaaacaaggtaatgaagcaactatttctattgcagtagatatccttttgtgtgtgtgtgtgtgcattaaagttgtaaacggtaacatgaaacaaatgaaagttcttgctataatggtatggaaaacaagaaggaaatgaaaatatttttatgcctacttaggaaaaaaagggtagcacttattcattccaagtacttttttttttttaatttttaagctcttaactcacattgttatgcttaagatgataaacatatatcctctttttattgctttgtctatgtttcatatgaaacatttcagaaattattttgataagtgttgctggaatctgcaacgctgatttttttttgcattctgtagtcgcatttgcactccatttttacattaattcgcagttgctttgtatcattgttttgtttgggttttgtttctttttcacagtgccgggtcttcgtttcttaaagttggatggcaggtagagttcaaccagttcgtgactgttgtagcgaatgaagttaaaaaaatgtctttctgatgttgtgttgtcattttcatttttgcatttttttgtttgcatattaaaaaaagagaaaagagaaagcaagagacagaaatcaggactaagtcctctgcttcagtttcattgttaacgggccttattctgatctcacctgtcgcgtagctctaatattcacataaactgaaataaagaagtggaatgaggagctttgacattcaaattatgtgatgtaatttatcttccttaggaattttgatggatgcatctcaaaatgtatagccagacttgagaggtgacaattaaagatctaaaaaagagaggagattcccccaaacaacaatatttaattttcttagtaaaaagaataacagaatgcatcgtggcaatccttaagcaacattatctatgtggactgcttaaatcagcaaaacaccagaagtttggttaacttgggcaatatgacaagtattactttttgggcaaaactactcattaagcaatttctctagtgtgtcggacacaaataggttctttatttttggcatgtatgcctttttattttcattcaattttttttttttctcagacagacatagtagtatcaactagcattggaaaatacatatcactattcttggaatatttatggtcagtctactttttagtaaaatatttttggatagcgttgacacgatagatcttattccatacttctttattattgataattttattttcattttttgctttcattattatacatattttggtggagaagaggttgggcttttttgaaagagacaaaaatttattataacactaaacactccttttttgacatattaaagcctttattccatctctcaagatatattataaaatttatttttttaatttaagatttctgaattattttatcttaaattgtgattttaaacgagctattatggtacggaactttttttaatgaggaatttcatgatgatttaggaattttctctcttggaaaaggcttcccctgtgatgaaaatgatgtgccagctaaaattgtgtgccatttaaaaactgaaaatattttaaaattatttgtctatattctaaattgagctttggatcaaactttaggccaggaccagctcatgcgttctcattcttccttttctcactctttctctcatcactcacctctgtattcattctgttgtttgggatagaaaaatcataaagagccaacccatctcagaacgttgtggattgagagagacactacatgactccaagtatatgagaaaaggacagagctctaattgataactctgtagttcaaaaggaaaagagtatgcccaattctctctacatgacatattgagattttttttaatcaacttttaagatagtgatgttctgttctaaactgttctgttttagtgaaggtagatttttataaaacaagcatggggattcttttctaaggtaatattaatgagaagggaaaaaagtatctttaacagctctttgttgaagcctgtggtagcacattatgtttataattgcacatgtgcacataatctattatgatccaatgcaaatacagctccaaaaatattaaatgtatatatattttaaaatgcctgaggaaatacatttttcttaataaactgaagagtctcagtatggctattaaaataattattagcctcctgttgtgtggctgcaaaacatcacaaagtgaccggtcttgagacctgtgaactgctgccctgtttagtaaataaaattaatgcatttctagagggggaatatctgccatccagtggtggaaatgtggagtaaagaagctggtggtctgcttctgtgctgtatgccagccttttgccttaagttgagaggaggtcaactttagctactgtctttggtttgagagccatggcaaaaaaaaaaaaagaaaaaaagatcaagtcgtctttggtgagccagtaaggtgaaagcttgctgactgtccaaggcacaagagaaaattgaggaattgaaatgcaacctgagtatcaaactaaatattctaatcaaaggtaggtactgttaggtggaattctatcagcaggcaactgcaaatgagaagaagatagaaggacgcccgtcgggactttggagggcattgttattttcccaaagaaagacggccaagggcagaggcatggattctttgcagagcacttccttttggtttttcagtactgtttcatagacagtgggctcacatgttcctgatagtgctgcagttgcttagaaagcatcccagttaattgcagtaattagaacttctggaatatgctagggcagaagtatgtcaagtatgtcacatgaagaaaatgtgaaattcaagagtaatccacacgtgagaaactagacaatgtacattcatgtgttctcttgaaaggaaagggagagctgtaagcttcactctgtcctacaccggagaaaagcaggaataactttaccgtggaaataatgtttagcttttatcagagaaaattgtccttctagagcatagagtcccaaaactcaattctggttttcccctgttttttttttttttttttttcccaacatatgaactgcagcatatcactttttctttttgtgcctcaggttcctcacctgtaaaattgaaaaatatatgtattaataatattattaataataataatggtaatgtagtacttgtttgtaaagcactttgagatccttggttgaaaggcaccataggagtgccaagtattattatgtggccaagggggttatttaaactgtcagttcccaaaggccaggaaaggttggggtcatttttcttaaagacgagctgtaaatatcaactaggcagccaatagtgttgactatgaagatgcaaaactattactaggctgataaaatcatagtttcttaatggctaccaataaggcaaatatcacaataataaacgccaaattccttagggcggactatttgacaaccacatggaaaactttgggggaggcatgaggggggaacatctcaaaatgccaatgtaaaatttaacttacagcaatattcaccagcagaaaatgtctttcatatggaatgatttcatgttgctaagaaaaagaattcaatttgtagtcctgatttgaatactagaatgttggctataatagttctgttcttacaacacatgaaattttttcgttttattttattttgttttcatagtgcatgttcatttctactcacaaacatgttcttggtgtatttcttatgcaaacaatcttcaggcagcaaagatgtctgttacatctaaacttgaataataaagttttaccaccagttacaca

SEQ ID NO: 871 - DNA, 10580 bp, Homo sapiens
  misc_feature (210)..(210): second gene starts at position 210
atgtccatccacttcagctccccggtattcacctcgcgctcagccgccttctcgggccgcggcgcccaggtgcgcctgagctccgctcgccccggcggccttggcagcagcagcctctacggcctcggcgcctcacggccgcgcgtggccgtgcgctctgcctatgggggcccggtgggcgccggcatccgcgaggtcaccattaaccagagcctgctggccccgctgcggctggacgccgacccctccctccagcgggtgcgccaggaggagagcgagcagatcaagaccctcaacaacaagtttgcctccttcatcgacaaggtgcggtttctggagcagcagaacaagctgctggagaccaagtggacgctgctgcaggagcagaagtcggccaagagcagccgcctcccagacatctttgaggcccagattgctggccttcggggtcagcttgaggcactgcaggtggatgggggccgcctggaggcggagctgcggagcatgcaggatgtggtggaggacttcaagaataagtacgaagatgaaattaaccaccgcacagctgctgagaatgagtttgtggtgctgaagaaggatgtggatgctgcctacatgagcaaggtggagctggaggccaaggtggatgccctgaatgatgagatcaacttcctcaggaccctcaatgagacggagttgacagagctgcagtcccagatctccgacacatctgtggtgctgtccatggacaacagtcgctccctggacctggacggcatcatcgctgaggtcaaggcgcagtatgaggagatggccaaatgcagccgggctgaggctgaagcctggtaccagaccaagtttgagaccctccaggcccaggctgggaagcatggggacgacctccggaatacccggaatgagatttcagagatgaaccgggccatccagaggctgcaggctgagatcgacaacatcaagaaccagcgtgccaagttggaggccgccattgccgaggctgaggagcgtggggagctggcgctcaaggatgctcgtgccaagcaggaggagctggaagccgccctgcagcggggcaagcaggatatggcacggcagctgcgtgagtaccaggaactcatgagcgtgaagctggccctggacatcgagatcgccacctaccgcaagctgctggagggcgaggagagccggttgctcctctccagcccttctcctgtgtgcctgcctcctgccgccgccaccatgaccacctccatccgccagttcacctcctccagctccatcaagggctcctccggcctggggggcggctcgtcccgcacctcctgccggctgtctggcggcctgggtgccggctcctgcaggctgggatctgctggcggcctgggcagcaccctcgggggtagcagctactccagctgctacagctttggctctggtggtggctatggcagcagctttgggggtgttgatgggctgctggctggaggtgagaaggccaccatgcagaacctcaatgaccgcctggcctcctacctggacaaggtgcgtgccctggaggaggccaacactgagctggaggtgaagatccgtgactggtaccagaggcaggccccggggcccgcccgtgactacagccagtactacaggacaattgaggagctgcagaacaagatcctcacagccaccgtggacaatgccaacatcctgctacagattgacaatgcccgtctggctgctgatgacttccgcaccaagtttgagacagagcaggccctgcgcctgagtgtggaggccgacatcaatggcctgcgcagggtgctggatgagctgaccctggccagagccgacctggagatgcagattgagaacctcaaggaggagctggcctacctgaagaagaaccacgaggaggagatgaacgccctgcgaggccaggtgggtggtgagatcaatgtggagatggacgctgccccaggcgtggacctgagccgcatcctcaacgagatgcgtgaccagtatgagaagatggcagagaagaaccgcaaggatgccgaggattggttcttcagcaagacagaggaactgaaccgcgaggtggccaccaacagtgagctggtgcagagtggcaagagtgagatctcggagctccggcgcaccatgcaggccttggagatagagctgcagtcccagctcagcatgaaagcatccctggagggcaacctggcggagacagagaaccgctactgcgtgcagctgtcccagatccaggggctgattggcagcgtggaggagcagctggcccagcttcgctgcgagatggagcagcagaaccaggaatacaaaatcctgctggatgtgaagacgcggctggagcaggagattgccacctaccgccgcctgctggagggagaggatgcccacctgactcagtacaagaaagaaccggtgaccacccgtcaggtgcgtaccattgtggaagaggtccaggatggcaaggtcatctcctcccgcgagcaggtccaccagaccacccgctgaggactcagctaccccggccggccacccaggaggcagggaggcagccgccccatctgccccacagtctccggcctctccagcctcagccccctgcttcagtcccttccccatgcttccttgcctgatgacaataaagcttgttgactcagctatgatcgctacgcccacttggtggcctataaaggaagcgggcgaaccccggcagccctacacaacttggggcccctctcctctccagcccttctcctgtgtgcctgcctcctgccgccgccaccatgaccacctccatccgccagttcacctcctccagctccatcaagggctcctccggcctggggggcggctcgtcccgcacctcctgccggctgtctggcggcctgggtgccggctcctgcaggctgggatctgctggcggcctgggcagcaccctcgggggtagcagctactccagctgctacagctttggctctggtggtggctatggcagcagctttgggggtgttgatgggctgctggctggaggtgagaaggccaccatgcagaacctcaatgaccgcctggcctcctacctggacaaggtgcgtgccctggaggaggccaacactgagctggaggtgaagatccgtgactggtaccagaggcaggccccggggcccgcccgtgactacagccagtactacaggacaattgaggagctgcagaacaagatcctcacagccaccgtggacaatgccaacatcctgctacagattgacaatgcccgtctggctgctgatgacttccgcaccaagtttgagacagagcaggccctgcgcctgagtgtggaggccgacatcaatggcctgcgcagggtgctggatgagctgaccctggccagagccgacctggagatgcagattgagaacctcaaggaggagctggcctacctgaagaagaaccacgaggaggagatgaacgccctgcgaggccaggtgggtggtgagatcaatgtggagatggacgctgccccaggcgtggacctgagccgcatcctcaacgagatgcgtgaccagtatgagaagatggcagagaagaaccgcaaggatgccgaggattggttcttcagcaagacagaggaactgaaccgcgaggtggccaccaacagtgagctggtgcagagtggcaagagtgagatctcggagctccggcgcaccatgcaggccttggagatagagctgcagtcccagctcagcatgaaagcatccctggagggcaacctggcggagacagagaaccgctactgcgtgcagctgtcccagatccaggggctgattggcagcgtggaggagcagctggcccagcttcgctgcgagatggagcagcagaaccaggaatacaaaatcctgctggatgtgaagacgcggctggagcaggagattgccacctaccgccgcctgctggagggagaggatgcccacctgactcagtacaagaaagaaccggtgaccacccgtcaggtgcgtaccattgtggaagaggtccaggatggcaaggtcatctcctcccgcgagcaggtccaccagaccacccgctgaggactcagctaccccggccggccacccaggaggcagggaggcagccgccccatctgccccacagtctccggcctctccagcctcagccccctgcttcagtcccttccccatgcttccttgcctgatgacaataaagcttgttgactcagctatgatcgctacgcccacttggtggcctataaaggaagcgggcgaaccccggcagccctacacaacttggggcccctctcctctccagcccttctcctgtgtgcctgcctcctgccgccgccaccatgaccacctccatccgccagttcacctcctccagctccatcaagggctcctccggcctggggggcggctcgtcccgcacctcctgccggctgtctggcggcctgggtgccggctcctgcaggctgggatctgctggcggcctgggcagcaccctcgggggtagcagctactccagctgctacagctttggctctggtggtggctatggcagcagctttgggggtgttgatgggctgctggctggaggtgagaaggccaccatgcagaacctcaatgaccgcctggcctcctacctggacaaggtgcgtgccctggaggaggccaacactgagctggaggtgaagatccgtgactggtaccagaggcaggccccggggcccgcccgtgactacagccagtactacaggacaattgaggagctgcagaacaagatcctcacagccaccgtggacaatgccaacatcctgctacagattgacaatgcccgtctggctgctgatgacttccgcaccaagtttgagacagagcaggccctgcgcctgagtgtggaggccgacatcaatggcctgcgcagggtgctggatgagctgaccctggccagagccgacctggagatgcagattgagaacctcaaggaggagctggcctacctgaagaagaaccacgaggaggagatgaacgccctgcgaggccaggtgggtggtgagatcaatgtggagatggacgctgccccaggcgtggacctgagccgcatcctcaacgagatgcgtgaccagtatgagaagatggcagagaagaaccgcaaggatgccgaggattggttcttcagcaagacagaggaactgaaccgcgaggtggccaccaacagtgagctggtgcagagtggcaagagtgagatctcggagctccggcgcaccatgcaggccttggagatagagctgcagtcccagctcagcatgaaagcatccctggagggcaacctggcggagacagagaaccgctactgcgtgcagctgtcccagatccaggggctgattggcagcgtggaggagcagctggcccagcttcgctgcgagatggagcagcagaaccaggaatacaaaatcctgctggatgtgaagacgcggctggagcaggagattgccacctaccgccgcctgctggagggagaggatgcccacctgactcagtacaagaaagaaccggtgaccacccgtcaggtgcgtaccattgtggaagaggtccaggatggcaaggtcatctcctcccgcgagcaggtccaccagaccacccgctgaggactcagctaccccggccggccacccaggaggcagggaggcagccgccccatctgccccacagtctccggcctctccagcctcagccccctgcttcagtcccttccccatgcttccttgcctgatgacaataaagcttgttgactcagctatgatcgctacgcccacttggtggcctataaaggaagcgggcgaaccccggcagccctacacaacttggggcccctctcctctccagcccttctcctgtgtgcctgcctcctgccgccgccaccatgaccacctccatccgccagttcacctcctccagctccatcaagggctcctccggcctggggggcggctcgtcccgcacctcctgccggctgtctggcggcctgggtgccggctcctgcaggctgggatctgctggcggcctgggcagcaccctcgggggtagcagctactccagctgctacagctttggctctggtggtggctatggcagcagctttgggggtgttgatgggctgctggctggaggtgagaaggccaccatgcagaacctcaatgaccgcctggcctcctacctggacaaggtgcgtgccctggaggaggccaacactgagctggaggtgaagatccgtgactggtaccagaggcaggccccggggcccgcccgtgactacagccagtactacaggacaattgaggagctgcagaacaagatcctcacagccaccgtggacaatgccaacatcctgctacagattgacaatgcccgtctggctgctgatgacttccgcaccaagtttgagacagagcaggccctgcgcctgagtgtggaggccgacatcaatggcctgcgcagggtgctggatgagctgaccctggccagagccgacctggagatgcagattgagaacctcaaggaggagctggcctacctgaagaagaaccacgaggaggagatgaacgccctgcgaggccaggtgggtggtgagatcaatgtggagatggacgctgccccaggcgtggacctgagccgcatcctcaacgagatgcgtgaccagtatgagaagatggcagagaagaaccgcaaggatgccgaggattggttcttcagcaagacagaggaactgaaccgcgaggtggccaccaacagtgagctggtgcagagtggcaagagtgagatctcggagctccggcgcaccatgcaggccttggagatagagctgcagtcccagctcagcatgaaagcatccctggagggcaacctggcggagacagagaaccgctactgcgtgcagctgtcccagatccaggggctgattggcagcgtggaggagcagctggcccagcttcgctgcgagatggagcagcagaaccaggaatacaaaatcctgctggatgtgaagacgcggctggagcaggagattgccacctaccgccgcctgctggagggagaggatgcccacctgactcagtacaagaaagaaccggtgaccacccgtcaggtgcgtaccattgtggaagaggtccaggatggcaaggtcatctcctcccgcgagcaggtccaccagaccacccgctgaggactcagctaccccggccggccacccaggaggcagggaggcagccgccccatctgccccacagtctccggcctctccagcctcagccccctgcttcagtcccttccccatgcttccttgcctgatgacaataaagcttgttgactcagctatgatcgctacgcccacttggtggcctataaaggaagcgggcgaaccccggcagccctacacaacttggggcccctctcctctccagcccttctcctgtgtgcctgcctcctgccgccgccaccatgaccacctccatccgccagttcacctcctccagctccatcaagggctcctccggcctggggggcggctcgtcccgcacctcctgccggctgtctggcggcctgggtgccggctcctgcaggctgggatctgctggcggcctgggcagcaccctcgggggtagcagctactccagctgctacagctttggctctggtggtggctatggcagcagctttgggggtgttgatgggctgctggctggaggtgagaaggccaccatgcagaacctcaatgaccgcctggcctcctacctggacaaggtgcgtgccctggaggaggccaacactgagctggaggtgaagatccgtgactggtaccagaggcaggccccggggcccgcccgtgactacagccagtactacaggacaattgaggagctgcagaacaagatcctcacagccaccgtggacaatgccaacatcctgctacagattgacaatgcccgtctggctgctgatgacttccgcaccaagtttgagacagagcaggccctgcgcctgagtgtggaggccgacatcaatggcctgcgcagggtgctggatgagctgaccctggccagagccgacctggagatgcagattgagaacctcaaggaggagctggcctacctgaagaagaaccacgaggaggagatgaacgccctgcgaggccaggtgggtggtgagatcaatgtggagatggacgctgccccaggcgtggacctgagccgcatcctcaacgagatgcgtgaccagtatgagaagatggcagagaagaaccgcaaggatgccgaggattggttcttcagcaagacagaggaactgaaccgcgaggtggccaccaacagtgagctggtgcagagtggcaagagtgagatctcggagctccggcgcaccatgcaggccttggagatagagctgcagtcccagctcagcatgaaagcatccctggagggcaacctggcggagacagagaaccgctactgcgtgcagctgtcccagatccaggggctgattggcagcgtggaggagcagctggcccagcttcgctgcgagatggagcagcagaaccaggaatacaaaatcctgctggatgtgaagacgcggctggagcaggagattgccacctaccgccgcctgctggagggagaggatgcccacctgactcagtacaagaaagaaccggtgaccacccgtcaggtgcgtaccattgtggaagaggtccaggatggcaaggtcatctcctcccgcgagcaggtccaccagaccacccgctgaggactcagctaccccggccggccacccaggaggcagggaggcagccgccccatctgccccacagtctccggcctctccagcctcagccccctgcttcagtcccttccccatgcttccttgcctgatgacaataaagcttgttgactcagctatgatcgctacgcccacttggtggcctataaaggaagcgggcgaaccccggcagccctacacaacttggggcccctctcctctccagcccttctcctgtgtgcctgcctcctgccgccgccaccatgaccacctccatccgccagttcacctcctccagctccatcaagggctcctccggcctggggggcggctcgtcccgcacctcctgccggctgtctggcggcctgggtgccggctcctgcaggctgggatctgctggcggcctgggcagcaccctcgggggtagcagctactccagctgctacagctttggctctggtggtggctatggcagcagctttgggggtgttgatgggctgctggctggaggtgagaaggccaccatgcagaacctcaatgaccgcctggcctcctacctggacaaggtgcgtgccctggaggaggccaacactgagctggaggtgaagatccgtgactggtaccagaggcaggccccggggcccgcccgtgactacagccagtactacaggacaattgaggagctgcagaacaagatcctcacagccaccgtggacaatgccaacatcctgctacagattgacaatgcccgtctggctgctgatgacttccgcaccaagtttgagacagagcaggccctgcgcctgagtgtggaggccgacatcaatggcctgcgcagggtgctggatgagctgaccctggccagagccgacctggagatgcagattgagaacctcaaggaggagctggcctacctgaagaagaaccacgaggaggagatgaacgccctgcgaggccaggtgggtggtgagatcaatgtggagatggacgctgccccaggcgtggacctgagccgcatcctcaacgagatgcgtgaccagtatgagaagatggcagagaagaaccgcaaggatgccgaggattggttcttcagcaagacagaggaactgaaccgcgaggtggccaccaacagtgagctggtgcagagtggcaagagtgagatctcggagctccggcgcaccatgcaggccttggagatagagctgcagtcccagctcagcatgaaagcatccctggagggcaacctggcggagacagagaaccgctactgcgtgcagctgtcccagatccaggggctgattggcagcgtggaggagcagctggcccagcttcgctgcgagatggagcagcagaaccaggaatacaaaatcctgctggatgtgaagacgcggctggagcaggagattgccacctaccgccgcctgctggagggagaggatgcccacctgactcagtacaagaaagaaccggtgaccacccgtcaggtgcgtaccattgtggaagaggtccaggatggcaaggtcatctcctcccgcgagcaggtccaccagaccacccgctgaggactcagctaccccggccggccacccaggaggcagggaggcagccgccccatctgccccacagtctccggcctctccagcctcagccccctgcttcagtcccttccccatgcttccttgcctgatgacaataaagcttgttgactcagctatg

SEQ ID NO: 872 - DNA, 3909 bp, Homo sapiens
  misc_feature (805)..(805): second gene starts at position 805
atggggaaggtgaaggtcggagtcaacggatttggtcgtattgggcgcctggtcaccagggctgcttttaactctggtaaagtggatattgttgccatcaatgaccccttcattgacctcaactacatggtttacatgttccaatatgattccacccatggcaaattccatggcaccgtcaaggctgagaacgggaagcttgtcatcaatggaaatcccatcaccatcttccaggagcgagatccctccaaaatcaagtggggcgatgctggcgctgagtacgtcgtggagtccactggcgtcttcaccaccatggagaaggctggggctcatttgcaggggggagccaaaagggtcatcatctctgccccctctgctgatgcccccatgttcgtcatgggtgtgaaccatgagaagtatgacaacagcctcaagatcatcagcaatgcctcctgcaccaccaactgcttagcacccctggccaaggtcatccatgacaactttggtatcgtggaaggactcatgaccacagtccatgccatcactgccacccagaagactgtggatggcccctccgggaaactgtggcgtgatggccgcggggctctccagaacatcatccctgcctctactggcgctgccaaggctgtgggcaaggtcatccctgagctgaacgggaagctcactggcatggccttccgtgtccccactgccaacgtgtcagtggtggacctgacctgccgtctagaaaaacctgccaaatatgatgacatcaagaaggtggtgaagcaggcgtcggagggcggagggcggcggcggcggctgcggtcgaagaaggggacgccgacaagagttgaagtattgataacaccaaggaactctatcacaatttgaaaagataagcaaaagtttgatttccagacactacagaagaagtaaaaatgcgtccaatgcgaatttttgtgaatgatgaccgccatgtgatggcaaagcattcttccgtttatccaacacaagaggagctggaggcagtccagaacatggtgtcccacacggagcgggcgctcaaagctgtgtccgactggatagacgagcaggaaaagggtagcagcgagcaggcagagtccgataacatggatgtgcccccagaggacgacagtaaagaaggggctggggaacagaagacggagcacatgaccagaaccctgcggggagtgatgcgggtgggcctggtggcaaagggcctcctactcaagggggacttggatctggagctggtgctgctgtgtaaggagaagcccacaaccgccctcctggacaaggtggccgacaacctggccatccagcttgctgctgtaacagaagacaagtacgaaatactgcaatctgtcgacgatgctgcgattgtgataaaaaacacaaaagagcctccattgtccctgaccatccacctgacatcccctgttgtcagagaagaaatggagaaagtattagctggagaaacgctatcagtcaacgaccccccggacgttctggacaggcagaaatgccttgctgccttggcgtccctccgacacgccaagtggttccaggccagagccaacgggctgaagtcttgtgtcattgtgatccgggtcttgagggacctgtgcactcgcgtgcccacctggggtcccctccgaggctggcctctcgagctcctgtgtgagaaatccattggcacggccaacagaccgatgggtgctggcgaggccctgcggagagtgctggagtgcctggcgtcgggcatcgtgatgccagatggttctggcatttatgacccttgtgaaaaagaagccactgatgctattgggcatctagacagacagcaacgggaagatatcacacagagtgcgcagcacgcactgcggctcgctgccttcggccagctccataaagtcctaggcatggaccctctgccttccaagatgcccaagaaaccaaagaatgaaaacccagtggactacaccgttcagatcccaccaagcaccacctatgccattacgcccatgaaacgcccaatggaggaggacggggaggagaagtcgcccagcaaaaagaagaagaagattcagaagaaagaggagaaggcagagcccccccaggctatgaatgccctgatgcggttgaaccagctgaagccagggctgcagtacaagctggtgtcccagactgggcccgtccatgcccccatctttaccatgtctgtggaggttgatggcaattcattcgaggcctctgggccctccaaaaagacggccaagctgcacgtggccgttaaggtgttacaggacatgggcttgccgacgggtgctgaaggcagggactcgagcaagggggaggactcggctgaggagaccgaggcgaagccagcagtggtggcccctgccccagtggtagaagctgtctccacccctagtgcggcctttccctcagatgccactgccgagcaggggccgatcctgacaaagcacggcaagaacccagtcatggagctgaacgagaagaggcgtgggctcaagtacgagctcatctccgagaccgggggcagccacgacaagcgcttcgtcatggaggtcgaagtggatggacagaagttccaaggtgctggttccaacaaaaaggtggcgaaggcctacgctgctcttgctgccctagaaaagcttttccctgacacccctctcgcccttgatgccaacaaaaagaagagagccccagtacccgtcagagggggaccgaaatttgctgctaagccacataaccctggcttcggcatgggaggccccatgcacaacgaagtgcccccaccccccaaccttcgagggcggggaagaggcgggagcatccggggacgagggcgcgggcgaggatttggtggcgccaaccatggaggctacatgaatgccggtgctgggtatggaagctatgggtacggaggcaactcggcgacagcaggctacacaggttttgtatgaatttttaaccttttaacaaactcccaaatctggttgatgcctttgacagtgatgaaaacgatttcaccacatctgaatccagagaaaccggctttttttcttattgcgagcatgttaaaacgttgggaacatgtggggaattgtatattgcgctgaattaacttctcccgcctcttgtaatgctctggtgggttcttgtttgggaatgcgatattttgtggctggtttagctagagagtgaactctcaaaggtatcaaaactgtgcttccattattagtgcaagaaacagacaggctttaaggggtagatgacgtgaaattttgcaagtcttaattacagctgcagatgcatgggattctggatttttttgttgctttttagtttaatgggactttaaaagtaattgaggagaaagaaccgtgatgttccctgtttctccagtaaaggactggcttttgcttgggcagaggtggtgctgctgggtgtgcagctgccacagactccaaaggcgtagaagtttgtgccaacacacggagtcattctggctctctgctgaggcccctgttttctggcaggtgccctccttggaaactggttttggctctgatcagcggttctttttgcagcaaagcctgcatctgtgttgacttgcaagattttgcgtttattcaggcaaaaactggtcaaaatggttactacatgatttgttcccagaggtttgaaacattcagtgaaactttttaaaactttgattgcatgatgtattttttttttagaaagttattgtttgagaataatgtctttttataccaggaaaatagttatcctgaatgacgttgaaaactccccctcccctttatttttttttaatcaatacatgtgaaagtaacaagc

SEQ ID NO: 873 - DNA, 6731 bp, Homo sapiens
  misc_feature (805)..(805): second gene starts at position 805
atggggaaggtgaaggtcggagtcaacggatttggtcgtattgggcgcctggtcaccagggctgcttttaactctggtaaagtggatattgttgccatcaatgaccccttcattgacctcaactacatggtttacatgttccaatatgattccacccatggcaaattccatggcaccgtcaaggctgagaacgggaagcttgtcatcaatggaaatcccatcaccatcttccaggagcgagatccctccaaaatcaagtggggcgatgctggcgctgagtacgtcgtggagtccactggcgtcttcaccaccatggagaaggctggggctcatttgcaggggggagccaaaagggtcatcatctctgccccctctgctgatgcccccatgttcgtcatgggtgtgaaccatgagaagtatgacaacagcctcaagatcatcagcaatgcctcctgcaccaccaactgcttagcacccctggccaaggtcatccatgacaactttggtatcgtggaaggactcatgaccacagtccatgccatcactgccacccagaagactgtggatggcccctccgggaaactgtggcgtgatggccgcggggctctccagaacatcatccctgcctctactggcgctgccaaggctgtgggcaaggtcatccctgagctgaacgggaagctcactggcatggccttccgtgtccccactgccaacgtgtcagtggtggacctgacctgccgtctagaaaaacctgccaaatatgatgacatcaagaaggtggtgaagcaggcgtcggagggcggagggcggcggcggcggctgcggtcgaagaaggggacgccgacaagagttgaagtattgataacaccaaggaactctatcacaatttgaaaagataagcaaaagtttgatttccagacactacagaagaagtaaaaatgcgtccaatgcgaatttttgtgaatgatgaccgccatgtgatggcaaagcattcttccgtttatccaacacaagaggagctggaggcagtccagaacatggtgtcccacacggagcgggcgctcaaagctgtgtccgactggatagacgagcaggaaaagggtagcagcgagcaggcagagtccgataacatggatgtgcccccagaggacgacagtaaagaaggggctggggaacagaagacggagcacatgaccagaaccctgcggggagtgatgcgggtgggcctggtggcaaagggcctcctactcaagggggacttggatctggagctggtgctgctgtgtaaggagaagcccacaaccgccctcctggacaaggtggccgacaacctggccatccagcttgctgctgtaacagaagacaagtacgaaatactgcaatctgtcgacgatgctgcgattgtgataaaaaacacaaaagagcctccattgtccctgaccatccacctgacatcccctgttgtcagagaagaaatggagaaagtattagctggagaaacgctatcagtcaacgaccccccggacgttctggacaggcagaaatgccttgctgccttggcgtccctccgacacgccaagtggttccaggccagagccaacgggctgaagtcttgtgtcattgtgatccgggtcttgagggacctgtgcactcgcgtgcccacctggggtcccctccgaggctggcctctcgagctcctgtgtgagaaatccattggcacggccaacagaccgatgggtgctggcgaggccctgcggagagtgctggagtgcctggcgtcgggcatcgtgatgccagatggttctggcatttatgacccttgtgaaaaagaagccactgatgctattgggcatctagacagacagcaacgggaagatatcacacagagtgcgcagcacgcactgcggctcgctgccttcggccagctccataaagtcctaggcatggaccctctgccttccaagatgcccaagaaaccaaagaatgaaaacccagtggactacaccgttcagatcccaccaagcaccacctatgccattacgcccatgaaacgcccaatggaggaggacggggaggagaagtcgcccagcaaaaagaagaagaagattcagaagaaagaggagaaggcagagcccccccaggctatgaatgccctgatgcggttgaaccagctgaagccagggctgcagtacaagctggtgtcccagactgggcccgtccatgcccccatctttaccatgtctgtggaggttgatggcaattcattcgaggcctctgggccctccaaaaagacggccaagctgcacgtggccgttaaggtgttacaggacatgggcttgccgacgggtgctgaaggcagggactcgagcaagggggaggactcggctgaggagaccgaggcgaagccagcagtggtggcccctgccccagtggtagaagctgtctccacccctagtgcggcctttccctcagatgccactgccgagcaggggccgatcctgacaaagcacggcaagaacccagtcatggagctgaacgagaagaggcgtgggctcaagtacgagctcatctccgagaccgggggcagccacgacaagcgcttcgtcatggaggtcgaagtggatggacagaagttccaaggtgctggttccaacaaaaaggtggcgaaggcctacgctgctcttgctgccctagaaaagcttttccctgacacccctctcgcccttgatgccaacaaaaagaagagagccccagtacccgtcagagggggaccgaaatttgctgctaagccacataaccctggcttcggcatgggaggccccatgcacaacgaagtgcccccaccccccaaccttcgagggcggggaagaggcgggagcatccggggacgagggcgcgggcgaggatttggtggcgccaaccatggaggctacatgaatgccggtgctgggtatggaagctatgggtacggaggcaactcggcgacagcaggctacagtcagttctacagcaacggagggcattctgggaatgccagtggcggtggcggcgggggcggtggtggctcctccggctatggctcctactaccaaggtgacaactacaactcaccggtgcccccaaaacacgctgggaagaagcagccgcacgggggccagcagaagccctcctacggctcgggctaccagtcccaccagggccagcagcagtcctacaaccagagcccctacagcaactatggccctccacagggcaagcagaaaggctataaccatggacaaggcagctactcctactcgaactcctacaactctcccgggggcgggggcggatccgactacaactacgagagcaaattcaactacagtggtagtggaggccgaagcggcgggaacagctacggctcaggcggggcatcctacaacccagggtcacacgggggctacggcggaggttctgggggcggctcctcataccaaggcaaacaaggaggctactcacagtcgaactacaactccccggggtccggccagaactacagtggccctcccagctcctaccagtcctcacaaggcggctatggcagaaacgcagaccacagcatgaactaccagtacagataagcccccgcggggcggagatttctaccttctgcacttactccccatcagaagatcgagttttatgcatcacagttaacatgtcagctggccctccaggcccccgcccccatcccgtccacgttgctgtgtcgtgaggtgcagcgggtcaccctgtggcccgtcctgtgacccatatttagccgtgtttgggactccgtgtcttcaatggtttgttagttgccattacaactttgtctgggtagagtttttgagtttttgcagttcagtatccctctgtctattcacacttcgtgttagtggtaactcagtttgtctttaaatagttacagaagggatacgtcatttgttaatgcttttgtgaagtgagttaaacgagctttctgtattttaatgctttagtgtttcagttttataagtgaagattttattttaaaaaccagtgggaaagagtggggggtttctttttatgtctgggtcattcaggcagtacatctgaattaagctgaatgtagacaaataaagaaaaacaaaactgcgcccgtcttaggcctgggtgtctgacccaccagcagtgcaatgggcaggtttccccactctattcctgctcttgggaaagcagcgtgggccatcaggatggtccctggtccttagagagggtccagttcaggcttctagacattttactcatgctcagcgaaggctggttcctggtcccctgggctgtgtagacccggtgtcccaccaggctccaggctcccaccatctacagaggggcttacagcgcccattctggtcttggggaacccatcacaaaataggctttttctgctccccgattctggtgtagttctaagtacacagtgatgtcctctgtaggggcgtgcctgtggtggaacataacgcagttacaaaagaaagggcaggtgaggcctgggtaaccccagccatggaccgtcagtggctggagggagcttcgtgtctgtgctggagctgcagcctgctcgccatctggaggctcagtggagtggggagttggggttctcataccagcagatttccctagagcgtgattctcccatctgaggcaatcttgcctcccaggggaaattttgcaatgtttggaggatgttgtcacagctagtagcgggtgctctgggatctggtggatagatgccaaggatgctgtcaagcatactgtactgcccagaacagtggcccatagcagggacctgccctatcaaaatatcaggtgtatggaggtggagtcccaacgctagagcagcccttctcagctccaccctgcccggggagggaggaggagctctggtttcagagcagtgccgggattgcctttccccaggatctgtgtcggccatccaggaagaactgtactggccaagcctgggaccacacgtctgcagagatcctgctctgctggcctgagccccaggccttggcctcctgtgcttgggtaaccatggccactgggaaaagcaaggaccgtgtttgactttcttggagaggtgaaagaggtgaaagaacaagttgtgtgctagaaaacttttgaggaattcttatttgtgttagagcagaggaggtcccagataccaagtggcgcctcccaggaaaggctgggagaagaggtggcctggagtaccccgagatcccagcagcgcacacagtggagggatgaggatggatgggtcctaacccctgattttgatgggatgtgttcatgtcctatctcctctcctggacacattaaggggttgggacaagaagagactcctgtgagatcagcagacctcgtgtttaaggagagaatgcctgcctgcaacactcatggagagggacacttcctggccccacctgctaaatacctccaaactctgggcaggcgcctgcattctcaacacaggacttcccttaacagtttccggatcagtgaccaccaccacgttcaggtttctgaatgcagacccaccacgagggatggattccacccgcccgccctgctgcagatacatgcggcacagcaggcacgtgcctggagagaacagctcctgagcacagcacccttggagccctcaccccgctcacgatcctcaccagtgctgatgatgccgtcatgctgctggcctgagacagtatcccagctacaacaggacgacaccgggttcaggaatatgtggctatcaccttgagcactgacagtggccttccaggctagttgccttccaaacgcaggtagccgacctgcaggagggcctacaaacgggcccagcaagagctgggcaacagctggcttgtgaaatgagacaccttgaccaatatgctttgggtggacggtctcctacatgttcagtggaggccaccaggagcatccatgagcggggaaggggtccacacccttacatggcaagttgatacgatggggtgcttggtggatgggccatggaggtccgtgagctggaactgggcacacgccatcccagagggctcaggatgccccaggaaggaaagaagggcaacagactacacgattggacgtgtgtggttgactgggatgaagttggagggaggggcagggccttgcaggggattggtactgatcccagggaggaagtgttggggcttcatgaactaggatgaaaggaggcccctgagccatgacaaggggcacatccaggatttccgccaccctgaatttagtagagctagtaggccctggtcgtcactctgggcagggatgccgtcagccttgagggtcgccacccacctgtgtgttgccctctgtcctggcagggaaacatacaccccttgtctcaccaccaaccttgcttgtgtagtcagcagggctggccctgccccaaggactcactgcatgtacccggacccctaggcctggcctttgcagcatagttgggagcttctggattccatctgcacctgtgagccccatgctggctgtgcactgcgcgggcctgagactgctggatacaatgttgggcaacaactcagccagcctgatggcagcctcagaggcttactctaacccatcccagaataaatggagacttcatgtgttcattgtttcattcactc

SEQ ID NO: 874 - DNA, 6743 bp, Homo sapiens
  misc_feature (805)..(805): second gene starts at position 805
atggggaaggtgaaggtcggagtcaacggatttggtcgtattgggcgcctggtcaccagggctgcttttaactctggtaaagtggatattgttgccatcaatgaccccttcattgacctcaactacatggtttacatgttccaatatgattccacccatggcaaattccatggcaccgtcaaggctgagaacgggaagcttgtcatcaatggaaatcccatcaccatcttccaggagcgagatccctccaaaatcaagtggggcgatgctggcgctgagtacgtcgtggagtccactggcgtcttcaccaccatggagaaggctggggctcatttgcaggggggagccaaaagggtcatcatctctgccccctctgctgatgcccccatgttcgtcatgggtgtgaaccatgagaagtatgacaacagcctcaagatcatcagcaatgcctcctgcaccaccaactgcttagcacccctggccaaggtcatccatgacaactttggtatcgtggaaggactcatgaccacagtccatgccatcactgccacccagaagactgtggatggcccctccgggaaactgtggcgtgatggccgcggggctctccagaacatcatccctgcctctactggcgctgccaaggctgtgggcaaggtcatccctgagctgaacgggaagctcactggcatggccttccgtgtccccactgccaacgtgtcagtggtggacctgacctgccgtctagaaaaacctgccaaatatgatgacatcaagaaggtggtgaagcaggcgtcggagggcggagggcggcggcggcggctgcggtcgaagaaggggacgccgacaagagttgaagtattgataacaccaaggaactctatcacaatttgaaaagataagcaaaagtttgatttccagacactacagaagaagtaaaaatgcgtccaatgcgaatttttgtgaatgatgaccgccatgtgatggcaaagcattcttccgtttatccaacacaagaggagctggaggcagtccagaacatggtgtcccacacggagcgggcgctcaaagctgtgtccgactggatagacgagcaggaaaagggtagcagcgagcaggcagagtccgataacatggatgtgcccccagaggacgacagtaaagaaggggctggggaacagaagacggagcacatgaccagaaccctgcggggagtgatgcgggtgggcctggtggcaaagggcctcctactcaagggggacttggatctggagctggtgctgctgtgtaaggagaagcccacaaccgccctcctggacaaggtggccgacaacctggccatccagcttgctgctgtaacagaagacaagtacgaaatactgcaatctgtcgacgatgctgcgattgtgataaaaaacacaaaagagcctccattgtccctgaccatccacctgacatcccctgttgtcagagaagaaatggagaaagtattagctggagaaacgctatcagtcaacgaccccccggacgttctggacaggcagaaatgccttgctgccttggcgtccctccgacacgccaagtggttccaggccagagccaacgggctgaagtcttgtgtcattgtgatccgggtcttgagggacctgtgcactcgcgtgcccacctggggtcccctccgaggctggcctctcgagctcctgtgtgagaaatccattggcacggccaacagaccgatgggtgctggcgaggccctgcggagagtgctggagtgcctggcgtcgggcatcgtgatgccagatggttctggcatttatgacccttgtgaaaaagaagccactgatgctattgggcatctagacagacagcaacgggaagatatcacacagagtgcgcagcacgcactgcggctcgctgccttcggccagctccataaagtcctaggcatggaccctctgccttccaagatgcccaagaaaccaaagaatgaaaacccagtggactacaccgttcagatcccaccaagcaccacctatgccattacgcccatgaaacgcccaatggaggaggacggggaggagaagtcgcccagcaaaaagaagaagaagattcagaagaaagaggagaaggcagagcccccccaggctatgaatgccctgatgcggttgaaccagctgaagccagggctgcagtacaagctggtgtcccagactgggcccgtccatgcccccatctttaccatgtctgtggaggttgatggcaattcattcgaggcctctgggccctccaaaaagacggccaagctgcacgtggccgttaaggtgttacaggacatgggcttgccgacgggtgctgaaggcagggactcgagcaagggggaggactcggctgaggagaccgaggcgaagccagcagtggtggcccctgccccagtggtagaagctgtctccacccctagtgcggcctttccctcagatgccactgccgagaacgtaaaacagcaggggccgatcctgacaaagcacggcaagaacccagtcatggagctgaacgagaagaggcgtgggctcaagtacgagctcatctccgagaccgggggcagccacgacaagcgcttcgtcatggaggtcgaagtggatggacagaagttccaaggtgctggttccaacaaaaaggtggcgaaggcctacgctgctcttgctgccctagaaaagcttttccctgacacccctctcgcccttgatgccaacaaaaagaagagagccccagtacccgtcagagggggaccgaaatttgctgctaagccacataaccctggcttcggcatgggaggccccatgcacaacgaagtgcccccaccccccaaccttcgagggcggggaagaggcgggagcatccggggacgagggcgcgggcgaggatttggtggcgccaaccatggaggctacatgaatgccggtgctgggtatggaagctatgggtacggaggcaactcggcgacagcaggctacagtcagttctacagcaacggagggcattctgggaatgccagtggcggtggcggcgggggcggtggtggctcctccggctatggctcctactaccaaggtgacaactacaactcaccggtgcccccaaaacacgctgggaagaagcagccgcacgggggccagcagaagccctcctacggctcgggctaccagtcccaccagggccagcagcagtcctacaaccagagcccctacagcaactatggccctccacagggcaagcagaaaggctataaccatggacaaggcagctactcctactcgaactcctacaactctcccgggggcgggggcggatccgactacaactacgagagcaaattcaactacagtggtagtggaggccgaagcggcgggaacagctacggctcaggcggggcatcctacaacccagggtcacacgggggctacggcggaggttctgggggcggctcctcataccaaggcaaacaaggaggctactcacagtcgaactacaactccccggggtccggccagaactacagtggccctcccagctcctaccagtcctcacaaggcggctatggcagaaacgcagaccacagcatgaactaccagtacagataagcccccgcggggcggagatttctaccttctgcacttactccccatcagaagatcgagttttatgcatcacagttaacatgtcagctggccctccaggcccccgcccccatcccgtccacgttgctgtgtcgtgaggtgcagcgggtcaccctgtggcccgtcctgtgacccatatttagccgtgtttgggactccgtgtcttcaatggtttgttagttgccattacaactttgtctgggtagagtttttgagtttttgcagttcagtatccctctgtctattcacacttcgtgttagtggtaactcagtttgtctttaaatagttacagaagggatacgtcatttgttaatgcttttgtgaagtgagttaaacgagctttctgtattttaatgctttagtgtttcagttttataagtgaagattttattttaaaaaccagtgggaaagagtggggggtttctttttatgtctgggtcattcaggcagtacatctgaattaagctgaatgtagacaaataaagaaaaacaaaactgcgcccgtcttaggcctgggtgtctgacccaccagcagtgcaatgggcaggtttccccactctattcctgctcttgggaaagcagcgtgggccatcaggatggtccctggtccttagagagggtccagttcaggcttctagacattttactcatgctcagcgaaggctggttcctggtcccctgggctgtgtagacccggtgtcccaccaggctccaggctcccaccatctacagaggggcttacagcgcccattctggtcttggggaacccatcacaaaataggctttttctgctccccgattctggtgtagttctaagtacacagtgatgtcctctgtaggggcgtgcctgtggtggaacataacgcagttacaaaagaaagggcaggtgaggcctgggtaaccccagccatggaccgtcagtggctggagggagcttcgtgtctgtgctggagctgcagcctgctcgccatctggaggctcagtggagtggggagttggggttctcataccagcagatttccctagagcgtgattctcccatctgaggcaatcttgcctcccaggggaaattttgcaatgtttggaggatgttgtcacagctagtagcgggtgctctgggatctggtggatagatgccaaggatgctgtcaagcatactgtactgcccagaacagtggcccatagcagggacctgccctatcaaaatatcaggtgtatggaggtggagtcccaacgctagagcagcccttctcagctccaccctgcccggggagggaggaggagctctggtttcagagcagtgccgggattgcctttccccaggatctgtgtcggccatccaggaagaactgtactggccaagcctgggaccacacgtctgcagagatcctgctctgctggcctgagccccaggccttggcctcctgtgcttgggtaaccatggccactgggaaaagcaaggaccgtgtttgactttcttggagaggtgaaagaggtgaaagaacaagttgtgtgctagaaaacttttgaggaattcttatttgtgttagagcagaggaggtcccagataccaagtggcgcctcccaggaaaggctgggagaagaggtggcctggagtaccccgagatcccagcagcgcacacagtggagggatgaggatggatgggtcctaacccctgattttgatgggatgtgttcatgtcctatctcctctcctggacacattaaggggttgggacaagaagagactcctgtgagatcagcagacctcgtgtttaaggagagaatgcctgcctgcaacactcatggagagggacacttcctggccccacctgctaaatacctccaaactctgggcaggcgcctgcattctcaacacaggacttcccttaacagtttccggatcagtgaccaccaccacgttcaggtttctgaatgcagacccaccacgagggatggattccacccgcccgccctgctgcagatacatgcggcacagcaggcacgtgcctggagagaacagctcctgagcacagcacccttggagccctcaccccgctcacgatcctcaccagtgctgatgatgccgtcatgctgctggcctgagacagtatcccagctacaacaggacgacaccgggttcaggaatatgtggctatcaccttgagcactgacagtggccttccaggctagttgccttccaaacgcaggtagccgacctgcaggagggcctacaaacgggcccagcaagagctgggcaacagctggcttgtgaaatgagacaccttgaccaatatgctttgggtggacggtctcctacatgttcagtggaggccaccaggagcatccatgagcggggaaggggtccacacccttacatggcaagttgatacgatggggtgcttggtggatgggccatggaggtccgtgagctggaactgggcacacgccatcccagagggctcaggatgccccaggaaggaaagaagggcaacagactacacgattggacgtgtgtggttgactgggatgaagttggagggaggggcagggccttgcaggggattggtactgatcccagggaggaagtgttggggcttcatgaactaggatgaaaggaggcccctgagccatgacaaggggcacatccaggatttccgccaccctgaatttagtagagctagtaggccctggtcgtcactctgggcagggatgccgtcagccttgagggtcgccacccacctgtgtgttgccctctgtcctggcagggaaacatacaccccttgtctcaccaccaaccttgcttgtgtagtcagcagggctggccctgccccaaggactcactgcatgtacccggacccctaggcctggcctttgcagcatagttgggagcttctggattccatctgcacctgtgagccccatgctggctgtgcactgcgcgggcctgagactgctggatacaatgttgggcaacaactcagccagcctgatggcagcctcagaggcttactctaacccatcccagaataaatggagacttcatgtgttcattgtttcattcactc

SEQ ID NO: 875 - DNA, 4352 bp, Homo sapiens
  misc_feature (805)..(805): second gene starts at position 805
atggggaaggtgaaggtcggagtcaacggatttggtcgtattgggcgcctggtcaccagggctgcttttaactctggtaaagtggatattgttgccatcaatgaccccttcattgacctcaactacatggtttacatgttccaatatgattccacccatggcaaattccatggcaccgtcaaggctgagaacgggaagcttgtcatcaatggaaatcccatcaccatcttccaggagcgagatccctccaaaatcaagtggggcgatgctggcgctgagtacgtcgtggagtccactggcgtcttcaccaccatggagaaggctggggctcatttgcaggggggagccaaaagggtcatcatctctgccccctctgctgatgcccccatgttcgtcatgggtgtgaaccatgagaagtatgacaacagcctcaagatcatcagcaatgcctcctgcaccaccaactgcttagcacccctggccaaggtcatccatgacaactttggtatcgtggaaggactcatgaccacagtccatgccatcactgccacccagaagactgtggatggcccctccgggaaactgtggcgtgatggccgcggggctctccagaacatcatccctgcctctactggcgctgccaaggctgtgggcaaggtcatccctgagctgaacgggaagctcactggcatggccttccgtgtccccactgccaacgtgtcagtggtggacctgacctgccgtctagaaaaacctgccaaatatgatgacatcaagaaggtggtgaagcaggcgtcggagggcggagggcggcggcggcggctgcggtcgaagaaggggacgccgacaagagttgaagtattgataacaccaaggaactctatcacaatttgaaaagataagcaaaagtttgatttccagacactacagaagaagtaaaaatgcgtccaatgcgaatttttgtgaatgatgaccgccatgtgatggcaaagcattcttccgtttatccaacacaagaggagctggaggcagtccagaacatggtgtcccacacggagcgggcgctcaaagctgtgtccgactggatagacgagcaggaaaagggtagcagcgagcaggcagagtccgataacatggatgtgcccccagaggacgacagtaaagaaggggctggggaacagaagacggagcacatgaccagaaccctgcggggagtgatgcgggtgggcctggtggcaaagggcctcctactcaagggggacttggatctggagctggtgctgctgtgtaaggagaagcccacaaccgccctcctggacaaggtggccgacaacctggccatccagcttgctgctgtaacagaagacaagtacgaaatactgcaatctgtcgacgatgctgcgattgtgataaaaaacacaaaagagcctccattgtccctgaccatccacctgacatcccctgttgtcagagaagaaatggagaaagtattagctggagaaacgctatcagtcaacgaccccccggacgttctggacaggcagaaatgccttgctgccttggcgtccctccgacacgccaagtggttccaggccagagccaacgggctgaagtcttgtgtcattgtgatccgggtcttgagggacctgtgcactcgcgtgcccacctggggtcccctccgaggctggcctctcgagctcctgtgtgagaaatccattggcacggccaacagaccgatgggtgctggcgaggccctgcggagagtgctggagtgcctggcgtcgggcatcgtgatgccagatggttctggcatttatgacccttgtgaaaaagaagccactgatgctattgggcatctagacagacagcaacgggaagatatcacacagagtgcgcagcacgcactgcggctcgctgccttcggccagctccataaagtcctaggcatggaccctctgccttccaagatgcccaagaaaccaaagaatgaaaacccagtggactacaccgttcagatcccaccaagcaccacctatgccattacgcccatgaaacgcccaatggaggaggacggggaggagaagtcgcccagcaaaaagaagaagaagattcagaagaaagaggagaaggcagagcccccccaggctatgaatgccctgatgcggttgaaccagctgaagccagggctgcagtacaagctggtgtcccagactgggcccgtccatgcccccatctttaccatgtctgtggaggttgatggcaattcattcgaggcctctgggccctccaaaaagacggccaagctgcacgtggccgttaaggtgttacaggacatgggcttgccgacgggtgctgaaggcagggactcgagcaagggggaggactcggctgaggagaccgaggcgaagccagcagtggtggcccctgccccagtggtagaagctgtctccacccctagtgcggcctttccctcagatgccactgccgagcaggggccgatcctgacaaagcacggcaagaacccagtcatggagctgaacgagaagaggcgtgggctcaagtacgagctcatctccgagaccgggggcagccacgacaagcgcttcgtcatggaggtcgaagtggatggacagaagttccaaggtgctggttccaacaaaaaggtggcgaaggcctacgctgctcttgctgccctagaaaagcttttccctgacacccctctcgcccttgatgccaacaaaaagaagagagccccagtacccgtcagagggggaccgaaatttgctgctaagccacataaccctggcttcggcatgggaggccccatgcacaacgaagtgcccccaccccccaaccttcgagggcggggaagaggcgggagcatccggggacgagggcgcgggcgaggatttggtggcgccaaccatggaggctacatgaatgccggtgctgggtatggaagctatgggtacggaggcaactcggcgacagcaggctacagtgactttttcacagactgctacggctatcatgattttgggtcttcctagagcgtctaaaagtattgcacacaaaatcaactttttactccaatttcctccaactccaaaacccaaagtgtccgtgctgtgtccctgtgcttcactgggtttctcaaccgtggcttttcaccgcagcttgtctgaaactcttagcctgcagaatttaagacaatggcagtttttatcgtgatttgcctttgaacttggtcctattgaagttcacaataagtggaaaacaattttttcagagaatgtatttttgtgcagaattgcacagaattctagagacagcgttgttcggcatcaaggcaaaagcccacctttgctttttatggaaagcattactttatttaaagagacagacaatgacgcattttaatctacctttgtcttaatttacagcaggttttgtatgaatttttaaccttttaacaaactcccaaatctggttgatgcctttgacagtgatgaaaacgatttcaccacatctgaatccagagaaaccggctttttttcttattgcgagcatgttaaaacgttgggaacatgtggggaattgtatattgcgctgaattaacttctcccgcctcttgtaatgctctggtgggttcttgtttgggaatgcgatattttgtggctggtttagctagagagtgaactctcaaaggtatcaaaactgtgcttccattattagtgcaagaaacagacaggctttaaggggtagatgacgtgaaattttgcaagtcttaattacagctgcagatgcatgggattctggatttttttgttgctttttagtttaatgggactttaaaagtaattgaggagaaagaaccgtgatgttccctgtttctccagtaaaggactggcttttgcttgggcagaggtggtgctgctgggtgtgcagctgccacagactccaaaggcgtagaagtttgtgccaacacacggagtcattctggctctctgctgaggcccctgttttctggcaggtgccctccttggaaactggttttggctctgatcagcggttctttttgcagcaaagcctgcatctgtgttgacttgcaagattttgcgtttattcaggcaaaaactggtcaaaatggttactacatgatttgttcccagaggtttgaaacattcagtgaaactttttaaaactttgattgcatgatgtattttttttttagaaagttattgtttgagaataatgtctttttataccaggaaaatagttatcctgaatgacgttgaaaactccccctcccctttatttttttttaatcaatacatgtgaaagtaacaagc

SEQ ID NO: 876 - DNA, 4364 bp, Homo sapiens
  misc_feature (805)..(805): second gene starts at position 805
atggggaaggtgaaggtcggagtcaacggatttggtcgtattgggcgcctggtcaccagggctgcttttaactctggtaaagtggatattgttgccatcaatgaccccttcattgacctcaactacatggtttacatgttccaatatgattccacccatggcaaattccatggcaccgtcaaggctgagaacgggaagcttgtcatcaatggaaatcccatcaccatcttccaggagcgagatccctccaaaatcaagtggggcgatgctggcgctgagtacgtcgtggagtccactggcgtcttcaccaccatggagaaggctggggctcatttgcaggggggagccaaaagggtcatcatctctgccccctctgctgatgcccccatgttcgtcatgggtgtgaaccatgagaagtatgacaacagcctcaagatcatcagcaatgcctcctgcaccaccaactgcttagcacccctggccaaggtcatccatgacaactttggtatcgtggaaggactcatgaccacagtccatgccatcactgccacccagaagactgtggatggcccctccgggaaactgtggcgtgatggccgcggggctctccagaacatcatccctgcctctactggcgctgccaaggctgtgggcaaggtcatccctgagctgaacgggaagctcactggcatggccttccgtgtccccactgccaacgtgtcagtggtggacctgacctgccgtctagaaaaacctgccaaatatgatgacatcaagaaggtggtgaagcaggcgtcggagggcggagggcggcggcggcggctgcggtcgaagaaggggacgccgacaagagttgaagtattgataacaccaaggaactctatcacaatttgaaaagataagcaaaagtttgatttccagacactacagaagaagtaaaaatgcgtccaatgcgaatttttgtgaatgatgaccgccatgtgatggcaaagcattcttccgtttatccaacacaagaggagctggaggcagtccagaacatggtgtcccacacggagcgggcgctcaaagctgtgtccgactggatagacgagcaggaaaagggtagcagcgagcaggcagagtccgataacatggatgtgcccccagaggacgacagtaaagaaggggctggggaacagaagacggagcacatgaccagaaccctgcggggagtgatgcgggtgggcctggtggcaaagggcctcctactcaagggggacttggatctggagctggtgctgctgtgtaaggagaagcccacaaccgccctcctggacaaggtggccgacaacctggccatccagcttgctgctgtaacagaagacaagtacgaaatactgcaatctgtcgacgatgctgcgattgtgataaaaaacacaaaagagcctccattgtccctgaccatccacctgacatcccctgttgtcagagaagaaatggagaaagtattagctggagaaacgctatcagtcaacgaccccccggacgttctggacaggcagaaatgccttgctgccttggcgtccctccgacacgccaagtggttccaggccagagccaacgggctgaagtcttgtgtcattgtgatccgggtcttgagggacctgtgcactcgcgtgcccacctggggtcccctccgaggctggcctctcgagctcctgtgtgagaaatccattggcacggccaacagaccgatgggtgctggcgaggccctgcggagagtgctggagtgcctggcgtcgggcatcgtgatgccagatggttctggcatttatgacccttgtgaaaaagaagccactgatgctattgggcatctagacagacagcaacgggaagatatcacacagagtgcgcagcacgcactgcggctcgctgccttcggccagctccataaagtcctaggcatggaccctctgccttccaagatgcccaagaaaccaaagaatgaaaacccagtggactacaccgttcagatcccaccaagcaccacctatgccattacgcccatgaaacgcccaatggaggaggacggggaggagaagtcgcccagcaaaaagaagaagaagattcagaagaaagaggagaaggcagagcccccccaggctatgaatgccctgatgcggttgaaccagctgaagccagggctgcagtacaagctggtgtcccagactgggcccgtccatgcccccatctttaccatgtctgtggaggttgatggcaattcattcgaggcctctgggccctccaaaaagacggccaagctgcacgtggccgttaaggtgttacaggacatgggcttgccgacgggtgctgaaggcagggactcgagcaagggggaggactcggctgaggagaccgaggcgaagccagcagtggtggcccctgccccagtggtagaagctgtctccacccctagtgcggcctttccctcagatgccactgccgagaacgtaaaacagcaggggccgatcctgacaaagcacggcaagaacccagtcatggagctgaacgagaagaggcgtgggctcaagtacgagctcatctccgagaccgggggcagccacgacaagcgcttcgtcatggaggtcgaagtggatggacagaagttccaaggtgctggttccaacaaaaaggtggcgaaggcctacgctgctcttgctgccctagaaaagcttttccctgacacccctctcgcccttgatgccaacaaaaagaagagagccccagtacccgtcagagggggaccgaaatttgctgctaagccacataaccctggcttcggcatgggaggccccatgcacaacgaagtgcccccaccccccaaccttcgagggcggggaagaggcgggagcatccggggacgagggcgcgggcgaggatttggtggcgccaaccatggaggctacatgaatgccggtgctgggtatggaagctatgggtacggaggcaactcggcgacagcaggctacagtgactttttcacagactgctacggctatcatgattttgggtcttcctagagcgtctaaaagtattgcacacaaaatcaactttttactccaatttcctccaactccaaaacccaaagtgtccgtgctgtgtccctgtgcttcactgggtttctcaaccgtggcttttcaccgcagcttgtctgaaactcttagcctgcagaatttaagacaatggcagtttttatcgtgatttgcctttgaacttggtcctattgaagttcacaataagtggaaaacaattttttcagagaatgtatttttgtgcagaattgcacagaattctagagacagcgttgttcggcatcaaggcaaaagcccacctttgctttttatggaaagcattactttatttaaagagacagacaatgacgcattttaatctacctttgtcttaatttacagcaggttttgtatgaatttttaaccttttaacaaactcccaaatctggttgatgcctttgacagtgatgaaaacgatttcaccacatctgaatccagagaaaccggctttttttcttattgcgagcatgttaaaacgttgggaacatgtggggaattgtatattgcgctgaattaacttctcccgcctcttgtaatgctctggtgggttcttgtttgggaatgcgatattttgtggctggtttagctagagagtgaactctcaaaggtatcaaaactgtgcttccattattagtgcaagaaacagacaggctttaaggggtagatgacgtgaaattttgcaagtcttaattacagctgcagatgcatgggattctggatttttttgttgctttttagtttaatgggactttaaaagtaattgaggagaaagaaccgtgatgttccctgtttctccagtaaaggactggcttttgcttgggcagaggtggtgctgctgggtgtgcagctgccacagactccaaaggcgtagaagtttgtgccaacacacggagtcattctggctctctgctgaggcccctgttttctggcaggtgccctccttggaaactggttttggctctgatcagcggttctttttgcagcaaagcctgcatctgtgttgacttgcaagattttgcgtttattcaggcaaaaactggtcaaaatggttactacatgatttgttcccagaggtttgaaacattcagtgaaactttttaaaactttgattgcatgatgtattttttttttagaaagttattgtttgagaataatgtctttttataccaggaaaatagttatcctgaatgacgttgaaaactccccctcccctttatttttttttaatcaatacatgtgaaagtaacaagc

SEQ ID NO: 877 - DNA, 1307 bp, Homo sapiens
  misc_feature (844)..(844): second gene starts at position 844
atgtcggaggagatcatcacgccggtgtactgcactggggtgtcagcccaagtgcagaagcagcgggccagggagctgggcctgggccgccatgagaatgccatcaagtacctgggccaggattatgagcagctgcgggtgcgatgcctgcagagtgggaccctcttccgtgatgaggccttccccccggtaccccagagcctgggttacaaggacctgggtcccaattcctccaagacctatggcatcaagtggaagcgtcccacggaactgctgtcaaacccccagttcattgtggatggagctacccgcacagacatctgccagggagcactgggggactgctggctcttggcggccatcgcctccctcactctcaacgacaccctcctgcaccgagtggttccgcacggccagagcttccagaatggctatgccggcatcttccatttccagctgtggcaatttggggagtgggtggacgtggtcgtggatgacctgctgcccatcaaggacgggaagctagtgttcgtgcactctgccgaaggcaacgagttctggagcgccctgcttgagaaggcctatgccaaggtaaatggcagctacgaggccctgtcagggggcagcacctcagagggctttgaggacttcacaggcggggttaccgagtggtacgagttgcgcaaggctcccagtgacctctaccagatcatcctcaaggcgctggagcggggctccctgctgggctgctccatagacatctccagcgttctagacatggaggccatcactttcaagaagttggtgaagggccatgcctactctgtgaccggggccaagcaggtcctggagctggactccatccgcagccaccactggtgcatccagggctgcagcgccgtcaccggggagaacctgctgccgggcatcgactggctcctggatgacatttccagccgcattttcacagctgactgaaccactccagatgccccccacctagcagtccaggtccctcaaccttcaccaaacactacccatggggggttgggagtcagccggccaaactaacactccccctcctccaccccagcctgctgctgctactgctgcccgctgctgctctgtggccacccggctcccatggcgggagggctgtgccctggctgtctctctggctcctgacctggcctttggctaccataccaagaagagagggctgggcggggaggagctgctactgctgctaccgaggctgtgggcctcatccttcactcagttgtgaaataaaccgctccttgccccga

SEQ ID NO: 878 - DNA, 25857 bp, Homo sapiens
  misc_feature (108)..(108): second gene starts at position 108
atgtctattctcaagatccatgccagggagatctttgactctcgcgggaatcccactgttgaggttgatctcttcacctcaaaaggtctcttcagagctgctgtgcccagtggtgcttcaactggtatctatgaggccctagagctccgggacaatgataagactcgctatatggggaagggtgtctcaaaggctgttgagcacatcaataaaactattgcgcctgccctggttagcaagaaactgaacgtcacagaacaagagaagattgacaaactgatgatcgagatggatggaacagaaaataaatctaagtttggtgcgaacgccattctgggggtgtcccttgccgtctgcaaagctggtgccgttgagaagggggtccccctgtaccgccacatcgctgacttggctggcaactctgaagtcatcctgccagtcccggcgttcaatgtcatcaatggcggttctcatgctggcaacaagctggccatgcaggagttcatgatcctcccagtcggtgcagcaaacttcagggaagccatgcgcattggagcagaggtttaccacaacctgaagaatgtcatcaaggagaaatatgggaaagatgccaccaatgtgggggatgaaggcgggtttgctcccaacatcctggagaataaagaaggcctggagctgctgaagactgctattgggaaagctggctacactgataaggtggtcatcggcatggacgtagcggcctccgagttcttcaggtctgggaagtatgacctggacttcaagtctcccgatgaccccagcaggtacatctcgcctgaccagctggctgacctgtacaagtccttcatcaaggactacccagtggtgtctatcgaagatccctttgaccaggatgactggggagcttggcagaagttcacagccagtgcaggaatccaggtagtgggggatgatctcacagtgaccaacccaaagaggatcgccaaggccgtgaacgagaagtcctgcaactgcctcctgctcaaagtcaaccagattggctccgtgaccgagtctcttcaggcgtgcaagctggcccaggccaatggttggggcgtcatggtgggcgtcatggtgggcatgggccagaaggactcctacgtgggcgacgaggcccagagcaagcgtggcatcctgaccctgaagtaccccattgagcatggcatcgtcaccaactgggacgacatggagaagatctggcaccacaccttctacaacgagctgcgcgtggccccggaggagcacccagtgctgctgaccgaggcccccctgaaccccaaggccaacagagagaagatgactcagattatgtttgagaccttcaacaccccggccatgtacgtggccatccaggccgtgctgtccctctacgcctctgggcgcaccactggcattgtcatggactctggagacggggtcacccacacggtgcccatctacgagggctacgccctcccccacgccatcctgcgtctggacctggctggccgggacctgaccgactacctcatgaagatcctcactgagcgaggctacagcttcaccaccacggccgagcgggaaatcgtgcgcgacatcaaggagaagctgtgctacgtcgccctggacttcgagcaggagatggccaccgccgcatcctcctcttctctggagaagagctacgagctgcccgatggccaggtcatcaccattggcaatgagcggttccggtgtccggaggcgctgttccagccttccttcctgggtatggaatcttgcggcatccacgagaccaccttcaactccatcatgaagtgtgacgtggacatccgcaaagacctgtacgccaacacggtgctgtcgggcggcaccaccatgtacccgggcattgccgacaggatgcagaaggagatcaccgccctggcgcccagcaccatgaagatcaagatcatcgcacccccagagcgcaagtactcggtgtggatcggtggctccatcctggcctcactgtccaccttccagcagatgtggattagcaagcaggagtacgacgagtcgggcccctccatcgtccaccgcaaatgcttctaaacggactcagcagatgcgtagcatttgctgcatgggttaattgagaatagaaatttgcccctggcaaatgcacacacctcatgctagcctcacgaaactggaataagccttcgaaaagaaattgtccttgaagcttgtatctgatatcagcactggattgtagaacttgttgctgattttgaccttgtattgaagttaactgttccccttggtatttgtttaataccctgtacatatctttgagttcaacctttagtacgtgtggcttggtcacttcgtggctaaggtaagaacgtgcttgtggaagacaagtctgtggcttggtgagtctgtgtggccagcagcctctgatctgtgcagggtattaacgtgtcagggctgagtgttctgggatttctctagaggctggcaagaaccagttgttttgtcttgcgggtctgtcagggttggaaagtccaagccgtaggacccagtttcctttcttagctgatgtctttggccagaacaccgtgggctgttacttgctttgagttggaagcggtttgcatttacgcctgtaaatgtattcattcttaatttatgtaaggttttttttgtacgcaattctcgattctttgaagagatgacaacaaattttggttttctactgttatgtgagaacattaggccccagcaacacgtcattgtgtaaggaaaaataaaagtgctgccgtaaccgtctcagtcgccgctgccagctctcgcactctgttcttccgccgctccgccgtcgcgtttctctgccggtcgcaatggaagaagagatcgccgcgctggtcattgacaatggctccggcatgtgcaaagctggttttgctggggacgacgctccccgagccgtgtttccttccatcgtcgggcgccccagacaccagggcgtcatggtgggcatgggccagaaggactcctacgtgggcgacgaggcccagagcaagcgtggcatcctgaccctgaagtaccccattgagcatggcatcgtcaccaactgggacgacatggagaagatctggcaccacaccttctacaacgagctgcgcgtggccccggaggagcacccagtgctgctgaccgaggcccccctgaaccccaaggccaacagagagaagatgactcagattatgtttgagaccttcaacaccccggccatgtacgtggccatccaggccgtgctgtccctctacgcctctgggcgcaccactggcattgtcatggactctggagacggggtcacccacacggtgcccatctacgagggctacgccctcccccacgccatcctgcgtctggacctggctggccgggacctgaccgactacctcatgaagatcctcactgagcgaggctacagcttcaccaccacggccgagcgggaaatcgtgcgcgacatcaaggagaagctgtgctacgtcgccctggacttcgagcaggagatggccaccgccgcatcctcctcttctctggagaagagctacgagctgcccgatggccaggtcatcaccattggcaatgagcggttccggtgtccggaggcgctgttccagccttccttcctgggtatggaatcttgcggcatccacgagaccaccttcaactccatcatgaagtgtgacgtggacatccgcaaagacctgtacgccaacacggtgctgtcgggcggcaccaccatgtacccgggcattgccgacaggatgcagaaggagatcaccgccctggcgcccagcaccatgaagatcaagatcatcgcacccccagagcgcaagtactcggtgtggatcggtggctccatcctggcctcactgtccaccttccagcagatgtggattagcaagcaggagtacgacgagtcgggcccctccatcgtccaccgcaaatgcttctaaacggactcagcagatgcgtagcatttgctgcatgggttaattgagaatagaaatttgcccctggcaaatgcacacacctcatgctagcctcacgaaactggaataagccttcgaaaagaaattgtccttgaagcttgtatctgatatcagcactggattgtagaacttgttgctgattttgaccttgtattgaagttaactgttccccttggtatttgtttaataccctgtacatatctttgagttcaacctttagtacgtgtggcttggtcacttcgtggctaaggtaagaacgtgcttgtggaagacaagtctgtggcttggtgagtctgtgtggccagcagcctctgatctgtgcagggtattaacgtgtcagggctgagtgttctgggatttctctagaggctggcaagaaccagttgttttgtcttgcgggtctgtcagggttggaaagtccaagccgtaggacccagtttcctttcttagctgatgtctttggccagaacaccgtgggctgttacttgctttgagttggaagcggtttgcatttacgcctgtaaatgtattcattcttaatttatgtaaggttttttttgtacgcaattctcgattctttgaagagatgacaacaaattttggttttctactgttatgtgagaacattaggccccagcaacacgtcattgtgtaaggaaaaataaaagtgctgccgtaaccgtctcagtcgccgctgccagctctcgcactctgttcttccgccgctccgccgtcgcgtttctctgccggtcgcaatggaagaagagatcgccgcgctggtcattgacaatggctccggcatgtgcaaagctggttttgctggggacgacgctccccgagccgtgtttccttccatcgtcgggcgccccagacaccagggcgtcatggtgggcatgggccagaaggactcctacgtgggcgacgaggcccagagcaagcgtggcatcctgaccctgaagtaccccattgagcatggcatcgtcaccaactgggacgacatggagaagatctggcaccacaccttctacaacgagctgcgcgtggccccggaggagcacccagtgctgctgaccgaggcccccctgaaccccaaggccaacagagagaagatgactcagattatgtttgagaccttcaacaccccggccatgtacgtggccatccaggccgtgctgtccctctacgcctctgggcgcaccactggcattgtcatggactctggagacggggtcacccacacggtgcccatctacgagggctacgccctcccccacgccatcctgcgtctggacctggctggccgggacctgaccgactacctcatgaagatcctcactgagcgaggctacagcttcaccaccacggccgagcgggaaatcgtgcgcgacatcaaggagaagctgtgctacgtcgccctggacttcgagcaggagatggccaccgccgcatcctcctcttctctggagaagagctacgagctgcccgatggccaggtcatcaccattggcaatgagcggttccggtgtccggaggcgctgttccagccttccttcctgggtatggaatcttgcggcatccacgagaccaccttcaactccatcatgaagtgtgacgtggacatccgcaaagacctgtacgccaacacggtgctgtcgggcggcaccaccatgtacccgggcattgccgacaggatgcagaaggagatcaccgccctggcgcccagcaccatgaagatcaagatcatcgcacccccagagcgcaagtactcggtgtggatcggtggctccatcctggcctcactgtccaccttccagcagatgtggattagcaagcaggagtacgacgagtcgggcccctccatcgtccaccgcaaatgcttctaaacggactcagcagatgcgtagcatttgctgcatgggttaattgagaatagaaatttgcccctggcaaatgcacacacctcatgctagcctcacgaaactggaataagccttcgaaaagaaattgtccttgaagcttgtatctgatatcagcactggattgtagaacttgttgctgattttgaccttgtattgaagttaactgttccccttggtatttgtttaataccctgtacatatctttgagttcaacctttagtacgtgtggcttggtcacttcgtggctaaggtaagaacgtgcttgtggaagacaagtctgtggcttggtgagtctgtgtggccagcagcctctgatctgtgcagggtattaacgtgtcagggctgagtgttctgggatttctctagaggctggcaagaaccagttgttttgtcttgcgggtctgtcagggttggaaagtccaagccgtaggacccagtttcctttcttagctgatgtctttggccagaacaccgtgggctgttacttgctttgagttggaagcggtttgcatttacgcctgtaaatgtattcattcttaatttatgtaaggttttttttgtacgcaattctcgattctttgaagagatgacaacaaattttggttttctactgttatgtgagaacattaggccccagcaacacgtcattgtgtaaggaaaaataaaagtgctgccgtaaccgtctcagtcgccgctgccagctctcgcactctgttcttccgccgctccgccgtcgcgtttctctgccggtcgcaatggaagaagagatcgccgcgctggtcattgacaatggctccggcatgtgcaaagctggttttgctggggacgacgctccccgagccgtgtttccttccatcgtcgggcgccccagacaccagggcgtcatggtgggcatgggccagaaggactcctacgtgggcgacgaggcccagagcaagcgtggcatcctgaccctgaagtaccccattgagcatggcatcgtcaccaactgggacgacatggagaagatctggcaccacaccttctacaacgagctgcgcgtggccccggaggagcacccagtgctgctgaccgaggcccccctgaaccccaaggccaacagagagaagatgactcagattatgtttgagaccttcaacaccccggccatgtacgtggccatccaggccgtgctgtccctctacgcctctgggcgcaccactggcattgtcatggactctggagacggggtcacccacacggtgcccatctacgagggctacgccctcccccacgccatcctgcgtctggacctggctggccgggacctgaccgactacctcatgaagatcctcactgagcgaggctacagcttcaccaccacggccgagcgggaaatcgtgcgcgacatcaaggagaagctgtgctacgtcgccctggacttcgagcaggagatggccaccgccgcatcctcctcttctctggagaagagctacgagctgcccgatggccaggtcatcaccattggcaatgagcggttccggtgtccggaggcgctgttccagccttccttcctgggtatggaatcttgcggcatccacgagaccaccttcaactccatcatgaagtgtgacgtggacatccgcaaagacctgtacgccaacacggtgctgtcgggcggcaccaccatgtacccgggcattgccgacaggatgcagaaggagatcaccgccctggcgcccagcaccatgaagatcaagatcatcgcacccccagagcgcaagtactcggtgtggatcggtggctccatcctggcctcactgtccaccttccagcagatgtggattagcaagcaggagtacgacgagtcgggcccctccatcgtccaccgcaaatgcttctaaacggactcagcagatgcgtagcatttgctgcatgggttaattgagaatagaaatttgcccctggcaaatgcacacacctcatgctagcctcacgaaactggaataagccttcgaaaagaaattgtccttgaagcttgtatctgatatcagcactggattgtagaacttgttgctgattttgaccttgtattgaagttaactgttccccttggtatttgtttaataccctgtacatatctttgagttcaacctttagtacgtgtggcttggtcacttcgtggctaaggtaagaacgtgcttgtggaagacaagtctgtggcttggtgagtctgtgtggccagcagcctctgatctgtgcagggtattaacgtgtcagggctgagtgttctgggatttctctagaggctggcaagaaccagttgttttgtcttgcgggtctgtcagggttggaaagtccaagccgtaggacccagtttcctttcttagctgatgtctttggccagaacaccgtgggctgttacttgctttgagttggaagcggtttgcatttacgcctgtaaatgtattcattcttaatttatgtaaggttttttttgtacgcaattctcgattctttgaagagatgacaacaaattttggttttctactgttatgtgagaacattaggccccagcaacacgtcattgtgtaaggaaaaataaaagtgctgccgtaaccgtctcagtcgccgctgccagctctcgcactctgttcttccgccgctccgccgtcgcgtttctctgccggtcgcaatggaagaagagatcgccgcgctggtcattgacaatggctccggcatgtgcaaagctggttttgctggggacgacgctccccgagccgtgtttccttccatcgtcgggcgccccagacaccagggcgtcatggtgggcatgggccagaaggactcctacgtgggcgacgaggcccagagcaagcgtggcatcctgaccctgaagtaccccattgagcatggcatcgtcaccaactgggacgacatggagaagatctggcaccacaccttctacaacgagctgcgcgtggccccggaggagcacccagtgctgctgaccgaggcccccctgaaccccaaggccaacagagagaagatgactcagattatgtttgagaccttcaacaccccggccatgtacgtggccatccaggccgtgctgtccctctacgcctctgggcgcaccactggcattgtcatggactctggagacggggtcacccacacggtgcccatctacgagggctacgccctcccccacgccatcctgcgtctggacctggctggccgggacctgaccgactacctcatgaagatcctcactgagcgaggctacagcttcaccaccacggccgagcgggaaatcgtgcgcgacatcaaggagaagctgtgctacgtcgccctggacttcgagcaggagatggccaccgccgcatcctcctcttctctggagaagagctacgagctgcccgatggccaggtcatcaccattggcaatgagcggttccggtgtccggaggcgctgttccagccttccttcctgggtatggaatcttgcggcatccacgagaccaccttcaactccatcatgaagtgtgacgtggacatccgcaaagacctgtacgccaacacggtgctgtcgggcggcaccaccatgtacccgggcattgccgacaggatgcagaaggagatcaccgccctggcgcccagcaccatgaagatcaagatcatcgcacccccagagcgcaagtactcggtgtggatcggtggctccatcctggcctcactgtccaccttccagcagatgtggattagcaagcaggagtacgacgagtcgggcccctccatcgtccaccgcaaatgcttctaaacggactcagcagatgcgtagcatttgctgcatgggttaattgagaatagaaatttgcccctggcaaatgcacacacctcatgctagcctcacgaaactggaataagccttcgaaaagaaattgtccttgaagcttgtatctgatatcagcactggattgtagaacttgttgctgattttgaccttgtattgaagttaactgttccccttggtatttgtttaataccctgtacatatctttgagttcaacctttagtacgtgtggcttggtcacttcgtggctaaggtaagaacgtgcttgtggaagacaagtctgtggcttggtgagtctgtgtggccagcagcctctgatctgtgcagggtattaacgtgtcagggctgagtgttctgggatttctctagaggctggcaagaaccagttgttttgtcttgcgggtctgtcagggttggaaagtccaagccgtaggacccagtttcctttcttagctgatgtctttggccagaacaccgtgggctgttacttgctttgagttggaagcggtttgcatttacgcctgtaaatgtattcattcttaatttatgtaaggttttttttgtacgcaattctcgattctttgaagagatgacaacaaattttggttttctactgttatgtgagaacattaggccccagcaacacgtcattgtgtaaggaaaaataaaagtgctgccgtaaccgtctcagtcgccgctgccagctctcgcactctgttcttccgccgctccgccgtcgcgtttctctgccggtcgcaatggaagaagagatcgccgcgctggtcattgacaatggctccggcatgtgcaaagctggttttgctggggacgacgctccccgagccgtgtttccttccatcgtcgggcgccccagacaccagggcgtcatggtgggcatgggccagaaggactcctacgtgggcgacgaggcccagagcaagcgtggcatcctgaccctgaagtaccccattgagcatggcatcgtcaccaactgggacgacatggagaagatctggcaccacaccttctacaacgagctgcgcgtggccccggaggagcacccagtgctgctgaccgaggcccccctgaaccccaaggccaacagagagaagatgactcagattatgtttgagaccttcaacaccccggccatgtacgtggccatccaggccgtgctgtccctctacgcctctgggcgcaccactggcattgtcatggactctggagacggggtcacccacacggtgcccatctacgagggctacgccctcccccacgccatcctgcgtctggacctggctggccgggacctgaccgactacctcatgaagatcctcactgagcgaggctacagcttcaccaccacggccgagcgggaaatcgtgcgcgacatcaaggagaagctgtgctacgtcgccctggacttcgagcaggagatggccaccgccgcatcctcctcttctctggagaagagctacgagctgcccgatggccaggtcatcaccattggcaatgagcggttccggtgtccggaggcgctgttccagccttccttcctgggtatggaatcttgcggcatccacgagaccaccttcaactccatcatgaagtgtgacgtggacatccgcaaagacctgtacgccaacacggtgctgtcgggcggcaccaccatgtacccgggcattgccgacaggatgcagaaggagatcaccgccctggcgcccagcaccatgaagatcaagatcatcgcacccccagagcgcaagtactcggtgtggatcggtggctccatcctggcctcactgtccaccttccagcagatgtggattagcaagcaggagtacgacgagtcgggcccctccatcgtccaccgcaaatgcttctaaacggactcagcagatgcgtagcatttgctgcatgggttaattgagaatagaaatttgcccctggcaaatgcacacacctcatgctagcctcacgaaactggaataagccttcgaaaagaaattgtccttgaagcttgtatctgatatcagcactggattgtagaacttgttgctgattttgaccttgtattgaagttaactgttccccttggtatttgtttaataccctgtacatatctttgagttcaacctttagtacgtgtggcttggtcacttcgtggctaaggtaagaacgtgcttgtggaagacaagtctgtggcttggtgagtctgtgtggccagcagcctctgatctgtgcagggtattaacgtgtcagggctgagtgttctgggatttctctagaggctggcaagaaccagttgttttgtcttgcgggtctgtcagggttggaaagtccaagccgtaggacccagtttcctttcttagctgatgtctttggccagaacaccgtgggctgttacttgctttgagttggaagcggtttgcatttacgcctgtaaatgtattcattcttaatttatgtaaggttttttttgtacgcaattctcgattctttgaagagatgacaacaaattttggttttctactgttatgtgagaacattaggccccagcaacacgtcattgtgtaaggaaaaataaaagtgctgccgtaaccgtctcagtcgccgctgccagctctcgcactctgttcttccgccgctccgccgtcgcgtttctctgccggtcgcaatggaagaagagatcgccgcgctggtcattgacaatggctccggcatgtgcaaagctggttttgctggggacgacgctccccgagccgtgtttccttccatcgtcgggcgccccagacaccagggcgtcatggtgggcatgggccagaaggactcctacgtgggcgacgaggcccagagcaagcgtggcatcctgaccctgaagtaccccattgagcatggcatcgtcaccaactgggacgacatggagaagatctggcaccacaccttctacaacgagctgcgcgtggccccggaggagcacccagtgctgctgaccgaggcccccctgaaccccaaggccaacagagagaagatgactcagattatgtttgagaccttcaacaccccggccatgtacgtggccatccaggccgtgctgtccctctacgcctctgggcgcaccactggcattgtcatggactctggagacggggtcacccacacggtgcccatctacgagggctacgccctcccccacgccatcctgcgtctggacctggctggccgggacctgaccgactacctcatgaagatcctcactgagcgaggctacagcttcaccaccacggccgagcgggaaatcgtgcgcgacatcaaggagaagctgtgctacgtcgccctggacttcgagcaggagatggccaccgccgcatcctcctcttctctggagaagagctacgagctgcccgatggccaggtcatcaccattggcaatgagcggttccggtgtccggaggcgctgttccagccttccttcctgggtatggaatcttgcggcatccacgagaccaccttcaactccatcatgaagtgtgacgtggacatccgcaaagacctgtacgccaacacggtgctgtcgggcggcaccaccatgtacccgggcattgccgacaggatgcagaaggagatcaccgccctggcgcccagcaccatgaagatcaagatcatcgcacccccagagcgcaagtactcggtgtggatcggtggctccatcctggcctcactgtccaccttccagcagatgtggattagcaagcaggagtacgacgagtcgggcccctccatcgtccaccgcaaatgcttctaaacggactcagcagatgcgtagcatttgctgcatgggttaattgagaatagaaatttgcccctggcaaatgcacacacctcatgctagcctcacgaaactggaataagccttcgaaaagaaattgtccttgaagcttgtatctgatatcagcactggattgtagaacttgttgctgattttgaccttgtattgaagttaactgttccccttggtatttgtttaataccctgtacatatctttgagttcaacctttagtacgtgtggcttggtcacttcgtggctaaggtaagaacgtgcttgtggaagacaagtctgtggcttggtgagtctgtgtggccagcagcctctgatctgtgcagggtattaacgtgtcagggctgagtgttctgggatttctctagaggctggcaagaaccagttgttttgtcttgcgggtctgtcagggttggaaagtccaagccgtaggacccagtttcctttcttagctgatgtctttggccagaacaccgtgggctgttacttgctttgagttggaagcggtttgcatttacgcctgtaaatgtattcattcttaatttatgtaaggttttttttgtacgcaattctcgattctttgaagagatgacaacaaattttggttttctactgttatgtgagaacattaggccccagcaacacgtcattgtgtaaggaaaaataaaagtgctgccgtaaccgtctcagtcgccgctgccagctctcgcactctgttcttccgccgctccgccgtcgcgtttctctgccggtcgcaatggaagaagagatcgccgcgctggtcattgacaatggctccggcatgtgcaaagctggttttgctggggacgacgctccccgagccgtgtttccttccatcgtcgggcgccccagacaccagggcgtcatggtgggcatgggccagaaggactcctacgtgggcgacgaggcccagagcaagcgtggcatcctgaccctgaagtaccccattgagcatggcatcgtcaccaactgggacgacatggagaagatctggcaccacaccttctacaacgagctgcgcgtggccccggaggagcacccagtgctgctgaccgaggcccccctgaaccccaaggccaacagagagaagatgactcagattatgtttgagaccttcaacaccccggccatgtacgtggccatccaggccgtgctgtccctctacgcctctgggcgcaccactggcattgtcatggactctggagacggggtcacccacacggtgcccatctacgagggctacgccctcccccacgccatcctgcgtctggacctggctggccgggacctgaccgactacctcatgaagatcctcactgagcgaggctacagcttcaccaccacggccgagcgggaaatcgtgcgcgacatcaaggagaagctgtgctacgtcgccctggacttcgagcaggagatggccaccgccgcatcctcctcttctctggagaagagctacgagctgcccgatggccaggtcatcaccattggcaatgagcggttccggtgtccggaggcgctgttccagccttccttcctgggtatggaatcttgcggcatccacgagaccaccttcaactccatcatgaagtgtgacgtggacatccgcaaagacctgtacgccaacacggtgctgtcgggcggcaccaccatgtacccgggcattgccgacaggatgcagaaggagatcaccgccctggcgcccagcaccatgaagatcaagatcatcgcacccccagagcgcaagtactcggtgtggatcggtggctccatcctggcctcactgtccaccttccagcagatgtggattagcaagcaggagtacgacgagtcgggcccctccatcgtccaccgcaaatgcttctaaacggactcagcagatgcgtagcatttgctgcatgggttaattgagaatagaaatttgcccctggcaaatgcacacacctcatgctagcctcacgaaactggaataagccttcgaaaagaaattgtccttgaagcttgtatctgatatcagcactggattgtagaacttgttgctgattttgaccttgtattgaagttaactgttccccttggtatttgtttaataccctgtacatatctttgagttcaacctttagtacgtgtggcttggtcacttcgtggctaaggtaagaacgtgcttgtggaagacaagtctgtggcttggtgagtctgtgtggccagcagcctctgatctgtgcagggtattaacgtgtcagggctgagtgttctgggatttctctagaggctggcaagaaccagttgttttgtcttgcgggtctgtcagggttggaaagtccaagccgtaggacccagtttcctttcttagctgatgtctttggccagaacaccgtgggctgttacttgctttgagttggaagcggtttgcatttacgcctgtaaatgtattcattcttaatttatgtaaggttttttttgtacgcaattctcgattctttgaagagatgacaacaaattttggttttctactgttatgtgagaacattaggccccagcaacacgtcattgtgtaaggaaaaataaaagtgctgccgtaaccgtctcagtcgccgctgccagctctcgcactctgttcttccgccgctccgccgtcgcgtttctctgccggtcgcaatggaagaagagatcgccgcgctggtcattgacaatggctccggcatgtgcaaagctggttttgctggggacgacgctccccgagccgtgtttccttccatcgtcgggcgccccagacaccagggcgtcatggtgggcatgggccagaaggactcctacgtgggcgacgaggcccagagcaagcgtggcatcctgaccctgaagtaccccattgagcatggcatcgtcaccaactgggacgacatggagaagatctggcaccacaccttctacaacgagctgcgcgtggccccggaggagcacccagtgctgctgaccgaggcccccctgaaccccaaggccaacagagagaagatgactcagattatgtttgagaccttcaacaccccggccatgtacgtggccatccaggccgtgctgtccctctacgcctctgggcgcaccactggcattgtcatggactctggagacggggtcacccacacggtgcccatctacgagggctacgccctcccccacgccatcctgcgtctggacctggctggccgggacctgaccgactacctcatgaagatcctcactgagcgaggctacagcttcaccaccacggccgagcgggaaatcgtgcgcgacatcaaggagaagctgtgctacgtcgccctggacttcgagcaggagatggccaccgccgcatcctcctcttctctggagaagagctacgagctgcccgatggccaggtcatcaccattggcaatgagcggttccggtgtccggaggcgctgttccagccttccttcctgggtatggaatcttgcggcatccacgagaccaccttcaactccatcatgaagtgtgacgtggacatccgcaaagacctgtacgccaacacggtgctgtcgggcggcaccaccatgtacccgggcattgccgacaggatgcagaaggagatcaccgccctggcgcccagcaccatgaagatcaagatcatcgcacccccagagcgcaagtactcggtgtggatcggtggctccatcctggcctcactgtccaccttccagcagatgtggattagcaagcaggagtacgacgagtcgggcccctccatcgtccaccgcaaatgcttctaaacggactcagcagatgcgtagcatttgctgcatgggttaattgagaatagaaatttgcccctggcaaatgcacacacctcatgctagcctcacgaaactggaataagccttcgaaaagaaattgtccttgaagcttgtatctgatatcagcactggattgtagaacttgttgctgattttgaccttgtattgaagttaactgttccccttggtatttgtttaataccctgtacatatctttgagttcaacctttagtacgtgtggcttggtcacttcgtggctaaggtaagaacgtgcttgtggaagacaagtctgtggcttggtgagtctgtgtggccagcagcctctgatctgtgcagggtattaacgtgtcagggctgagtgttctgggatttctctagaggctggcaagaaccagttgttttgtcttgcgggtctgtcagggttggaaagtccaagccgtaggacccagtttcctttcttagctgatgtctttggccagaacaccgtgggctgttacttgctttgagttggaagcggtttgcatttacgcctgtaaatgtattcattcttaatttatgtaaggttttttttgtacgcaattctcgattctttgaagagatgacaacaaattttggttttctactgttatgtgagaacattaggccccagcaacacgtcattgtgtaaggaaaaataaaagtgctgccgtaaccgtctcagtcgccgctgccagctctcgcactctgttcttccgccgctccgccgtcgcgtttctctgccggtcgcaatggaagaagagatcgccgcgctggtcattgacaatggctccggcatgtgcaaagctggttttgctggggacgacgctccccgagccgtgtttccttccatcgtcgggcgccccagacaccagggcgtcatggtgggcatgggccagaaggactcctacgtgggcgacgaggcccagagcaagcgtggcatcctgaccctgaagtaccccattgagcatggcatcgtcaccaactgggacgacatggagaagatctggcaccacaccttctacaacgagctgcgcgtggccccggaggagcacccagtgctgctgaccgaggcccccctgaaccccaaggccaacagagagaagatgactcagattatgtttgagaccttcaacaccccggccatgtacgtggccatccaggccgtgctgtccctctacgcctctgggcgcaccactggcattgtcatggactctggagacggggtcacccacacggtgcccatctacgagggctacgccctcccccacgccatcctgcgtctggacctggctggccgggacctgaccgactacctcatgaagatcctcactgagcgaggctacagcttcaccaccacggccgagcgggaaatcgtgcgcgacatcaaggagaagctgtgctacgtcgccctggacttcgagcaggagatggccaccgccgcatcctcctcttctctggagaagagctacgagctgcccgatggccaggtcatcaccattggcaatgagcggttccggtgtccggaggcgctgttccagccttccttcctgggtatggaatcttgcggcatccacgagaccaccttcaactccatcatgaagtgtgacgtggacatccgcaaagacctgtacgccaacacggtgctgtcgggcggcaccaccatgtacccgggcattgccgacaggatgcagaaggagatcaccgccctggcgcccagcaccatgaagatcaagatcatcgcacccccagagcgcaagtactcggtgtggatcggtggctccatcctggcctcactgtccaccttccagcagatgtggattagcaagcaggagtacgacgagtcgggcccctccatcgtccaccgcaaatgcttctaaacggactcagcagatgcgtagcatttgctgcatgggttaattgagaatagaaatttgcccctggcaaatgcacacacctcatgctagcctcacgaaactggaataagccttcgaaaagaaattgtccttgaagcttgtatctgatatcagcactggattgtagaacttgttgctgattttgaccttgtattgaagttaactgttccccttggtatttgtttaataccctgtacatatctttgagttcaacctttagtacgtgtggcttggtcacttcgtggctaaggtaagaacgtgcttgtggaagacaagtctgtggcttggtgagtctgtgtggccagcagcctctgatctgtgcagggtattaacgtgtcagggctgagtgttctgggatttctctagaggctggcaagaaccagttgttttgtcttgcgggtctgtcagggttggaaagtccaagccgtaggacccagtttcctttcttagctgatgtctttggccagaacaccgtgggctgttacttgctttgagttggaagcggtttgcatttacgcctgtaaatgtattcattcttaatttatgtaaggttttttttgtacgcaattctcgattctttgaagagatgacaacaaattttggttttctactgttatgtgagaacattaggccccagcaacacgtcattgtgtaaggaaaaataaaagtgctgccgtaaccgtctcagtcgccgctgccagctctcgcactctgttcttccgccgctccgccgtcgcgtttctctgccggtcgcaatggaagaagagatcgccgcgctggtcattgacaatggctccggcatgtgcaaagctggttttgctggggacgacgctccccgagccgtgtttccttccatcgtcgggcgccccagacaccagggcgtcatggtgggcatgggccagaaggactcctacgtgggcgacgaggcccagagcaagcgtggcatcctgaccctgaagtaccccattgagcatggcatcgtcaccaactgggacgacatggagaagatctggcaccacaccttctacaacgagctgcgcgtggccccggaggagcacccagtgctgctgaccgaggcccccctgaaccccaaggccaacagagagaagatgactcagattatgtttgagaccttcaacaccccggccatgtacgtggccatccaggccgtgctgtccctctacgcctctgggcgcaccactggcattgtcatggactctggagacggggtcacccacacggtgcccatctacgagggctacgccctcccccacgccatcctgcgtctggacctggctggccgggacctgaccgactacctcatgaagatcctcactgagcgaggctacagcttcaccaccacggccgagcgggaaatcgtgcgcgacatcaaggagaagctgtgctacgtcgccctggacttcgagcaggagatggccaccgccgcatcctcctcttctctggagaagagctacgagctgcccgatggccaggtcatcaccattggcaatgagcggttccggtgtccggaggcgctgttccagccttccttcctgggtatggaatcttgcggcatccacgagaccaccttcaactccatcatgaagtgtgacgtggacatccgcaaagacctgtacgccaacacggtgctgtcgggcggcaccaccatgtacccgggcattgccgacaggatgcagaaggagatcaccgccctggcgcccagcaccatgaagatcaagatcatcgcacccccagagcgcaagtactcggtgtggatcggtggctccatcctggcctcactgtccaccttccagcagatgtggattagcaagcaggagtacgacgagtcgggcccctccatcgtccaccgcaaatgcttctaaacggactcagcagatgcgtagcatttgctgcatgggttaattgagaatagaaatttgcccctggcaaatgcacacacctcatgctagcctcacgaaactggaataagccttcgaaaagaaattgtccttgaagcttgtatctgatatcagcactggattgtagaacttgttgctgattttgaccttgtattgaagttaactgttccccttggtatttgtttaataccctgtacatatctttgagttcaacctttagtacgtgtggcttggtcacttcgtggctaaggtaagaacgtgcttgtggaagacaagtctgtggcttggtgagtctgtgtggccagcagcctctgatctgtgcagggtattaacgtgtcagggctgagtgttctgggatttctctagaggctggcaagaaccagttgttttgtcttgcgggtctgtcagggttggaaagtccaagccgtaggacccagtttcctttcttagctgatgtctttggccagaacaccgtgggctgttacttgctttgagttggaagcggtttgcatttacgcctgtaaatgtattcattcttaatttatgtaaggttttttttgtacgcaattctcgattctttgaagagatgacaacaaattttggttttctactgttatgtgagaacattaggccccagcaacacgtcattgtgtaaggaaaaataaaagtgctgccgtaaccgtctcagtcgccgctgccagctctcgcactctgttcttccgccgctccgccgtcgcgtttctctgccggtcgcaatggaagaagagatcgccgcgctggtcattgacaatggctccggcatgtgcaaagctggttttgctggggacgacgctccccgagccgtgtttccttccatcgtcgggcgccccagacaccagggcgtcatggtgggcatgggccagaaggactcctacgtgggcgacgaggcccagagcaagcgtggcatcctgaccctgaagtaccccattgagcatggcatcgtcaccaactgggacgacatggagaagatctggcaccacaccttctacaacgagctgcgcgtggccccggaggagcacccagtgctgctgaccgaggcccccctgaaccccaaggccaacagagagaagatgactcagattatgtttgagaccttcaacaccccggccatgtacgtggccatccaggccgtgctgtccctctacgcctctgggcgcaccactggcattgtcatggactctggagacggggtcacccacacggtgcccatctacgagggctacgccctcccccacgccatcctgcgtctggacctggctggccgggacctgaccgactacctcatgaagatcctcactgagcgaggctacagcttcaccaccacggccgagcgggaaatcgtgcgcgacatcaaggagaagctgtgctacgtcgccctggacttcgagcaggagatggccaccgccgcatcctcctcttctctggagaagagctacgagctgcccgatggccaggtcatcaccattggcaatgagcggttccggtgtccggaggcgctgttccagccttccttcctgggtatggaatcttgcggcatccacgagaccaccttcaactccatcatgaagtgtgacgtggacatccgcaaagacctgtacgccaacacggtgctgtcgggcggcaccaccatgtacccgggcattgccgacaggatgcagaaggagatcaccgccctggcgcccagcaccatgaagatcaagatcatcgcacccccagagcgcaagtactcggtgtggatcggtggctccatcctggcctcactgtccaccttccagcagatgtggattagcaagcaggagtacgacgagtcgggcccctccatcgtccaccgcaaatgcttctaaacggactcagcagatgcgtagcatttgctgcatgggttaattgagaatagaaatttgcccctggcaaatgcacacacctcatgctagcctcacgaaactggaataagccttcgaaaagaaattgtccttgaagcttgtatctgatatcagcactggattgtagaacttgttgctgattttgaccttgtattgaagttaactgttccccttggtatttgtttaataccctgtacatatctttgagttcaacctttagtacgtgtggcttggtcacttcgtggctaaggtaagaacgtgcttgtggaagacaagtctgtggcttggtgagtctgtgtggccagcagcctctgatctgtgcagggtattaacgtgtcagggctgagtgttctgggatttctctagaggctggcaagaaccagttgttttgtcttgcgggtctgtcagggttggaaagtccaagccgtaggacccagtttcctttcttagctgatgtctttggccagaacaccgtgggctgttacttgctttgagttggaagcggtttgcatttacgcctgtaaatgtattcattcttaatttatgtaaggttttttttgtacgcaattctcgattctttgaagagatgacaacaaattttggttttctactgttatgtgagaacattaggccccagcaacacgtcattgtgtaaggaaaaataaaagtgctgccgtaaccgtctcagtcgccgctgccagctctcgcactctgttcttccgccgctccgccgtcgcgtttctctgccggtcgcaatggaagaagagatcgccgcgctggtcattgacaatggctccggcatgtgcaaagctggttttgctggggacgacgctccccgagccgtgtttccttccatcgtcgggcgccccagacaccagggcgtcatggtgggcatgggccagaaggactcctacgtgggcgacgaggcccagagcaagcgtggcatcctgaccctgaagtaccccattgagcatggcatcgtcaccaactgggacgacatggagaagatctggcaccacaccttctacaacgagctgcgcgtggccccggaggagcacccagtgctgctgaccgaggcccccctgaaccccaaggccaacagagagaagatgactcagattatgtttgagaccttcaacaccccggccatgtacgtggccatccaggccgtgctgtccctctacgcctctgggcgcaccactggcattgtcatggactctggagacggggtcacccacacggtgcccatctacgagggctacgccctcccccacgccatcctgcgtctggacctggctggccgggacctgaccgactacctcatgaagatcctcactgagcgaggctacagcttcaccaccacggccgagcgggaaatcgtgcgcgacatcaaggagaagctgtgctacgtcgccctggacttcgagcaggagatggccaccgccgcatcctcctcttctctggagaagagctacgagctgcccgatggccaggtcatcaccattggcaatgagcggttccggtgtccggaggcgctgttccagccttccttcctgggtatggaatcttgcggcatccacgagaccaccttcaactccatcatgaagtgtgacgtggacatccgcaaagacctgtacgccaacacggtgctgtcgggcggcaccaccatgtacccgggcattgccgacaggatgcagaaggagatcaccgccctggcgcccagcaccatgaagatcaagatcatcgcacccccagagcgcaagtactcggtgtggatcggtggctccatcctggcctcactgtccaccttccagcagatgtggattagcaagcaggagtacgacgagtcgggcccctccatcgtccaccgcaaatgcttctaaacggactcagcagatgcgtagcatttgctgcatgggttaattgagaatagaaatttgcccctggcaaatgcacacacctcatgctagcctcacgaaactggaataagccttcgaaaagaaattgtccttgaagcttgtatctgatatcagcactggattgtagaacttgttgctgattttgaccttgtattgaagttaactgttccccttggtatttgtttaataccctgtacatatctttgagttcaacctttagtacgtgtggcttggtcacttcgtggctaaggtaagaacgtgcttgtggaagacaagtctgtggcttggtgagtctgtgtggccagcagcctctgatctgtgcagggtattaacgtgtcagggctgagtgttctgggatttctctagaggctggcaagaaccagttgttttgtcttgcgggtctgtcagggttggaaagtccaagccgtaggacccagtttcctttcttagctgatgtctttggccagaacaccgtgggctgttacttgctttgagttggaagcggtttgcatttacgcctgtaaatgtattcattcttaatttatgtaaggttttttttgtacgcaattctcgattctttgaagagatgacaacaaattttggttttctactgttatgtgagaacattaggccccagcaacacgtcattgtgtaaggaaaaataaaagtgctgccgtaacc

SEQ ID NO: 879 - DNA, 5543 bp, Homo sapiens
  misc_feature (33)..(33): second gene starts at position 33
atgttcagctttgtggacctccggctcctgctcctcttagcggccaccgccctcctgacgcacggccaagaggaaggccaagtcgagggccaagacgaagacatcccaccaatcacctgcgtacagaacggcctcaggtaccatgaccgagacgtgtggaaacccgagccctgccggatctgcgtctgcgacaacggcaaggtgttgtgcgatgacgtgatctgtgacgagaccaagaactgccccggcgccgaagtccccgagggcgagtgctgtcccgtctgccccgacggctcagagtcacccaccgaccaagaaaccaccggcgtcgagggacccaagggagacactggcccccgaggcccaaggggacccgcaggcccccctggccgagatggcatccctggacagcctggacttcccggaccccccggaccccccggacctcccggaccccctggcctcggaggaaactttgctccccagctgtcttatggctatgatgagaaatcaaccggaggaatttccgtgcctggccccatgggtccctctggtcctcgtggtctccctggcccccctggtgcacctggtccccaaggcttccaaggtccccctggtgagcctggcgagcctggagcttcaggtcccatgggtccccgaggtcccccaggtccccctggaaagaatggagatgatggggaagctggaaaacctggtcgtcctggtgagcgtgggcctcctgggcctcagggtgctcgaggattgcccggaacagctggcctccctggaatgaagggacacagaggtttcagtggtttggatggtgccaagggagatgctggtcctgctggtcctaagggtgagcctggcagccctggtgaaaatggagctcctggtcagatgggcccccgtggcctgcctggtgagagaggtcgccctggagcccctggccctgctggtgctcgtggaaatgatggtgctactggtgctgccgggccccctggtcccaccggccccgctggtcctcctggcttccctggtgctgttggtgctaagggtgaagctggtccccaagggccccgaggctctgaaggtccccagggtgtgcgtggtgagcctggcccccctggccctgctggtgctgctggccctgctggaaaccctggtgctgatggacagcctggtgctaaaggtgccaatggtgctcctggtattgctggtgctcctggcttccctggtgcccgaggcccctctggaccccagggccccggcggccctcctggtcccaagggtaacagcggtgaacctggtgctcctggcagcaaaggagacactggtgctaagggagagcctggccctgttggtgttcaaggaccccctggccctgctggagaggaaggaaagcgaggagctcgaggtgaacccggacccactggcctgcccggaccccctggcgagcgtggtggacctggtagccgtggtttccctggcgcagatggtgttgctggtcccaagggtcccgctggtgaacgtggttctcctggccctgctggccccaaaggatctcctggtgaagctggtcgtcccggtgaagctggtctgcctggtgccaagggtctgactggaagccctggcagccctggtcctgatggcaaaactggcccccctggtcccgccggtcaagatggtcgccccggacccccaggcccacctggtgcccgtggtcaggctggtgtgatgggattccctggacctaaaggtgctgctggagagcccggcaaggctggagagcgaggtgttcccggaccccctggcgctgtcggtcctgctggcaaagatggagaggctggagctcagggaccccctggccctgctggtcccgctggcgagagaggtgaacaaggccctgctggctcccccggattccagggtctccctggtcctgctggtcctccaggtgaagcaggcaaacctggtgaacagggtgttcctggagaccttggcgcccctggcccctctggagcaagaggcgagagaggtttccctggcgagcgtggtgtgcaaggtccccctggtcctgctggtccccgaggggccaacggtgctcccggcaacgatggtgctaagggtgatgctggtgcccctggagctcccggtagccagggcgcccctggccttcagggaatgcctggtgaacgtggtgcagctggtcttccagggcctaagggtgacagaggtgatgctggtcccaaaggtgctgatggctctcctggcaaagatggcgtccgtggtctgactggccccattggtcctcctggccctgctggtgcccctggtgacaagggtgaaagtggtcccagcggccctgctggtcccactggagctcgtggtgcccccggagaccgtggtgagcctggtccccccggccctgctggctttgctggcccccctggtgctgacggccaacctggtgctaaaggcgaacctggtgatgctggtgctaaaggcgatgctggtccccctggccctgccggacccgctggaccccctggccccattggtaatgttggtgctcctggagccaaaggtgctcgcggcagcgctggtccccctggtgctactggtttccctggtgctgctggccgagtcggtcctcctggcccctctggaaatgctggaccccctggccctcctggtcctgctggcaaagaaggcggcaaaggtccccgtggtgagactggccctgctggacgtcctggtgaagttggtccccctggtccccctggccctgctggcgagaaaggatcccctggtgctgatggtcctgctggtgctcctggtactcccgggcctcaaggtattgctggacagcgtggtgtggtcggcctgcctggtcagagaggagagagaggcttccctggtcttcctggcccctctggtgaacctggcaaacaaggtccctctggagcaagtggtgaacgtggtccccctggtcccatgggcccccctggattggctggaccccctggtgaatctggacgtgagggggctcctggtgccgaaggttcccctggacgagacggttctcctggcgccaagggtgaccgtggtgagaccggccccgctggaccccctggtgctcctggtgctcctggtgcccctggccccgttggccctgctggcaagagtggtgatcgtggtgagactggtcctgctggtcccaccggtcctgtcggccctgttggcgcccgtggccccgccggaccccaaggcccccgtggtgacaagggtgagacaggcgaacagggcgacagaggcataaagggtcaccgtggcttctctggcctccagggtccccctggccctcctggctctcctggtgaacaaggtccctctggagcctctggtcctgctggtccccgaggtccccctggctctgctggtgctcctggcaaagatggactcaacggtctccctggccccattgggccccctggtcctcgcggtcgcactggtgatgctggtcctgttggtccccccggccctcctggacctcctggtccccctggtcctcccagcgctggtttcgacttcagcttcctgccccagccacctcaagagaaggctcacgatggtggccgctactaccgggctgatgatgccaatgtggttcgtgaccgtgacctcgaggtggacaccaccctcaagagcctgagccagcagatcgagaacatccggagcccagagggcagccgcaagaaccccgcccgcacctgccgtgacctcaagatgtgccactctgactggaagagtggagagtactggattgaccccaaccaaggctgcaacctggatgccatcaaagtcttctgcaacatggagactggtgagacctgcgtgtaccccactcagcccagtgtggcccagaagaactggtacatcagcaagaaccccaaggacaagaggcatgtctggttcggcgagagcatgaccgatggattccagttcgagtatggcggccagggctccgacggcggacaaagcccgattgttcctgggccctttccccatcgcgcctgggcctgctccccagcccggggcaggggcgggggccagtgtggtgacacacgctgtagctgtctccccggctggctggctcgctctctcctggggacacagaggtcggcaggcagcacacagagggacctacgggcagctgttccttcccccgactcaagaatccccggagcccggaggcctgcagcaggagcggccatgaagaagctgatggtggtgctgagtctgattgctgcagcctgggcagaggagcagaataagttggtgcatggcggaccctgcgacaagacatctcacccctaccaagctgccctctacacctcgggccacttgctctgtggtggggtccttatccatccactgtgggtcctcacagctgcccactgcaaaaaaccgaatcttcaggtcttcctggggaagcataaccttcggcaaagggagagttcccaggagcagagttctgttgtccgggctgtgatccaccctgactatgatgccgccagccatgaccaggacatcatgctgttgcgcctggcacgcccagccaaactctctgaactcatccagccccttcccctggagagggactgctcagccaacaccaccagctgccacatcctgggctggggcaagacagcagatggtgatttccctgacaccatccagtgtgcatacatccacctggtgtcccgtgaggagtgtgagcatgcctaccctggccagatcacccagaacatgttgtgtgctggggatgagaagtacgggaaggattcctgccagggtgattctgggggtccgctggtatgtggagaccacctccgaggccttgtgtcatggggtaacatcccctgtggatcaaaggagaagccaggagtctacaccaacgtctgcagatacacgaactggatccaaaaaaccattcaggccaagtgaccctgacatgtgacatctacctcccgacctaccaccccactggctggttccagaacgtctctcacctagaccttgcctcccctcctctcctgcccagctctgaccctgatgcttaataaacgcagcgacgtgagggtcctgattctccctggttttaccccagctccatccttgcatcactggggaggacgtgatgagtgaggacttgggtcctcggtcttacccccaccactaagagaatacaggaaaatcccttctaggcatctcctctccccaacccttccacacgtttgatttcttcctgcagaggcccagccacgtgtctggaatcccagctccgctgcttactgtcggtgtccccttgggatgtacctttcttcactgcagatttctcacctgtaagatgaagataaggatgatacagtctccataaggcagtggctgttggaaagatttaaggtttcacacctatgacatacatggaatagcacctgggccaccatgcactcaataaagaatgaattttattatga

SEQ ID NO: 880 - DNA, 2629 bp, Homo sapiens
  misc_feature (1905)..(1905): second gene starts at position 1905
atggagaccccgtcccagcggcgcgccacccgcagcggggcgcaggccagctccactccgctgtcgcccacccgcatcacccggctgcaggagaaggaggacctgcaggagctcaatgatcgcttggcggtctacatcgaccgtgtgcgctcgctggaaacggagaacgcagggctgcgccttcgcatcaccgagtctgaagaggtggtcagccgcgaggtgtccggcatcaaggccgcctacgaggccgagctcggggatgcccgcaagacccttgactcagtagccaaggagcgcgcccgcctgcagctggagctgagcaaagtgcgtgaggagtttaaggagctgaaagcgcgcaataccaagaaggagggtgacctgatagctgctcaggctcggctgaaggacctggaggctctgctgaactccaaggaggccgcactgagcactgctctcagtgagaagcgcacgctggagggcgagctgcatgatctgcggggccaggtggccaagcttgaggcagccctaggtgaggccaagaagcaacttcaggatgagatgctgcggcgggtggatgctgagaacaggctgcagaccatgaaggaggaactggacttccagaagaacatctacagtgaggagctgcgtgagaccaagcgccgtcatgagacccgactggtggagattgacaatgggaagcagcgtgagtttgagagccggctggcggatgcgctgcaggaactgcgggcccagcatgaggaccaggtggagcagtataagaaggagctggagaagacttattctgccaagctggacaatgccaggcagtctgctgagaggaacagcaacctggtgggggctgcccacgaggagctgcagcagtcgcgcatccgcatcgacagcctctctgcccagctcagccagctccagaagcagctggcagccaaggaggcgaagcttcgagacctggaggactcactggcccgtgagcgggacaccagccggcggctgctggcggaaaaggagcgggagatggccgagatgcgggcaaggatgcagcagcagctggacgagtaccaggagcttctggacatcaagctggccctggacatggagatccacgcctaccgcaagctcttggagggcgaggaggagaggctacgcctgtcccccagccctacctcgcagcgcagccgtggccgtgcttcctctcactcatcccagacacagggtgggggcagcgtcaccaaaaagcgcaaactggagtccactgagagccgcagcagcttctcacagcacgcacgcactagcgggcgcgtggccgtggaggaggtggatgaggagggcaagtttgtccggctgcgcaacaagtccaatgaggaccagtccatgggcaattggcagatcaagcgccagaatggagatgatcccttgctgacttaccggttcccaccaaagttcaccctgaaggctgggcaggtggtgacgatctgggctgcaggagctggggccacccacagcccccctaccgacctggtgtggaaggcacagaacacctggggctgcgggaacagcctgcgtacggctctcatcaactccactggggaaggctcccactgcagcagctcgggggaccccgctgagtacaacctgcgctcgcgcaccgtgctgtgcgggacctgcgggcagcctgccgacaaggcatctgccagcggctcaggagcccaggtgggcggacccatctcctctggctcttctgcctccagtgtcacggtcactcgcagctaccgcagtgtggggggcagtgggggtggcagcttcggggacaatctggtcacccgctcctacctcctgggcaactccagcccccgaacccagagcccccagaactgcagcatcatgtatctgggacctgccagcaccgtttttgtggttagctccttcttgccaaccaaccatgagctcccagattcgtcagaattattccaccgacgtggaggcagccgtcaacagcctggtcaatttgtacctgcaggcctcctacacctacctctctctgggcttctatttcgaccgcgatgatgtggctctggaaggcgtgagccacttcttccgcgaattggccgaggagaagcgcgagggctacgagcgtctcctgaagatgcaaaaccagcgtggcggccgcgctctcttccaggacatcaagaagccagctgaagatgagtggggtaaaaccccagacgccatgaaagctgccatggccctggagaaaaagctgaaccaggcccttttggatcttcatgccctgggttctgcccgcacggacccccatctctgtgacttcctggagactcacttcctagatgaggaagtgaagcttatcaagaagatgggtgaccacctgaccaacctccacaggctgggtggcccggaggctgggctgggcgagtatctcttcgaaaggctcactctcaagcacgactaagagccttctgagcccagcgacttctgaagggccccttgcaaagtaatagggcttctgcctaagcctctccctccagccaataggcagctttcttaactatcctaacaagccttggaccaaatggaaataaagctttttgatgca

SEQ ID NO: 881 - DNA, 2719 bp, Homo sapiens
  misc_feature (1995)..(1995): second gene starts at position 1995
atggagaccccgtcccagcggcgcgccacccgcagcggggcgcaggccagctccactccgctgtcgcccacccgcatcacccggctgcaggagaaggaggacctgcaggagctcaatgatcgcttggcggtctacatcgaccgtgtgcgctcgctggaaacggagaacgcagggctgcgccttcgcatcaccgagtctgaagaggtggtcagccgcgaggtgtccggcatcaaggccgcctacgaggccgagctcggggatgcccgcaagacccttgactcagtagccaaggagcgcgcccgcctgcagctggagctgagcaaagtgcgtgaggagtttaaggagctgaaagcgcgcaataccaagaaggagggtgacctgatagctgctcaggctcggctgaaggacctggaggctctgctgaactccaaggaggccgcactgagcactgctctcagtgagaagcgcacgctggagggcgagctgcatgatctgcggggccaggtggccaagcttgaggcagccctaggtgaggccaagaagcaacttcaggatgagatgctgcggcgggtggatgctgagaacaggctgcagaccatgaaggaggaactggacttccagaagaacatctacagtgaggagctgcgtgagaccaagcgccgtcatgagacccgactggtggagattgacaatgggaagcagcgtgagtttgagagccggctggcggatgcgctgcaggaactgcgggcccagcatgaggaccaggtggagcagtataagaaggagctggagaagacttattctgccaagctggacaatgccaggcagtctgctgagaggaacagcaacctggtgggggctgcccacgaggagctgcagcagtcgcgcatccgcatcgacagcctctctgcccagctcagccagctccagaagcagctggcagccaaggaggcgaagcttcgagacctggaggactcactggcccgtgagcgggacaccagccggcggctgctggcggaaaaggagcgggagatggccgagatgcgggcaaggatgcagcagcagctggacgagtaccaggagcttctggacatcaagctggccctggacatggagatccacgcctaccgcaagctcttggagggcgaggaggagaggctacgcctgtcccccagccctacctcgcagcgcagccgtggccgtgcttcctctcactcatcccagacacagggtgggggcagcgtcaccaaaaagcgcaaactggagtccactgagagccgcagcagcttctcacagcacgcacgcactagcgggcgcgtggccgtggaggaggtggatgaggagggcaagtttgtccggctgcgcaacaagtccaatgaggaccagtccatgggcaattggcagatcaagcgccagaatggagatgatcccttgctgacttaccggttcccaccaaagttcaccctgaaggctgggcaggtggtgacgatctgggctgcaggagctggggccacccacagcccccctaccgacctggtgtggaaggcacagaacacctggggctgcgggaacagcctgcgtacggctctcatcaactccactggggaagaagtggccatgcgcaagctggtgcgctcagtgactgtggttgaggacgacgaggatgaggatggagatgacctgctccatcaccaccacggctcccactgcagcagctcgggggaccccgctgagtacaacctgcgctcgcgcaccgtgctgtgcgggacctgcgggcagcctgccgacaaggcatctgccagcggctcaggagcccaggtgggcggacccatctcctctggctcttctgcctccagtgtcacggtcactcgcagctaccgcagtgtggggggcagtgggggtggcagcttcggggacaatctggtcacccgctcctacctcctgggcaactccagcccccgaacccagagcccccagaactgcagcatcatgtatctgggacctgccagcaccgtttttgtggttagctccttcttgccaaccaaccatgagctcccagattcgtcagaattattccaccgacgtggaggcagccgtcaacagcctggtcaatttgtacctgcaggcctcctacacctacctctctctgggcttctatttcgaccgcgatgatgtggctctggaaggcgtgagccacttcttccgcgaattggccgaggagaagcgcgagggctacgagcgtctcctgaagatgcaaaaccagcgtggcggccgcgctctcttccaggacatcaagaagccagctgaagatgagtggggtaaaaccccagacgccatgaaagctgccatggccctggagaaaaagctgaaccaggcccttttggatcttcatgccctgggttctgcccgcacggacccccatctctgtgacttcctggagactcacttcctagatgaggaagtgaagcttatcaagaagatgggtgaccacctgaccaacctccacaggctgggtggcccggaggctgggctgggcgagtatctcttcgaaaggctcactctcaagcacgactaagagccttctgagcccagcgacttctgaagggccccttgcaaagtaatagggcttctgcctaagcctctccctccagccaataggcagctttcttaactatcctaacaagccttggaccaaatggaaataaagctttttgatgca

SEQ ID NO: 882 - DNA, 3300 bp, Homo sapiens
  misc_feature (654)..(654): second gene starts at position 654
atgccctaccaatatccagcactgaccccggagcagaagaaggagctgtctgacatcgctcaccgcatcgtggcacctggcaagggcatcctggctgcagatgagtccactgggagcattgccaagcggctgcagtccattggcaccgagaacaccgaggagaaccggcgcttctaccgccagctgctgctgacagctgacgaccgcgtgaacccctgcattgggggtgtcatcctcttccatgagacactctaccagaaggcggatgatgggcgtcccttcccccaagttatcaaatccaagggcggtgttgtgggcatcaaggtagacaagggcgtggtccccctggcagggacaaatggcgagactaccacccaagggttggatgggctgtctgagcgctgtgcccagtacaagaaggacggagctgacttcgccaagtggcgttgtgtgctgaagattggggaacacaccccctcagccctcgccatcatggaaaatgccaatgttctggcccgttatgccagtatctgccagcagaatggcattgtgcccatcgtggagcctgagatcctccctgatggggaccatgacttgaagcgctgccagtatgtgaccgagaaggtgctggctgctgtctacaaggctctgaggtggtggtcacgtggcccagatttatgctatccgtcagtccatctccaaagccctggtggcctattaccagaaatatgtggatgaggcttccaagaaggagatcaaagacatcctcatccagtatgaccggaccctgctggtagctgaccctcgtcgctgcgagtccaaaaagtttggaggccctggtgcccgcgctcgctaccagaaatcctaccgataagcccatcgtgactcaaaactcacttgtataataaacagtttttgagggattttaaagtttcaagaagaaaagcggccagggtggcccctagctttccttttccggttgcggcgccgcgcggtgaggttgtctagtccacgctcggagccatgccgtccaagggcccgctgcagtctgtgcaggtcttcggacgcaagaagacagcgacagctgtggcgcactgcaaacgcggcaatggtctcatcaaggtgaacgggcggcccctggagatgattgagccgcgcacgctacagtacaagctgctggagccagttctgcttctcggcaaggagcgatttgctggtgtagacatccgtgtccgtgtaaagggtggtggtcacgtggcccagatttatgctatccgtcagtccatctccaaagccctggtggcctattaccagaaatatgtggatgaggcttccaagaaggagatcaaagacatcctcatccagtatgaccggaccctgctggtagctgaccctcgtcgctgcgagtccaaaaagtttggaggccctggtgcccgcgctcgctaccagaaatcctaccgataagcccatcgtgactcaaaactcacttgtataataaacagtttttgagggattttaaagtttcaagaagaaaagcggccagggtggcccctagctttccttttccggttgcggcgccgcgcggtgaggttgtctagtccacgctcggagccatgccgtccaagggcccgctgcagtctgtgcaggtcttcggacgcaagaagacagcgacagctgtggcgcactgcaaacgcggcaatggtctcatcaaggtgaacgggcggcccctggagatgattgagccgcgcacgctacagtacaagctgctggagccagttctgcttctcggcaaggagcgatttgctggtgtagacatccgtgtccgtgtaaagggtggtggtcacgtggcccagatttatgctatccgtcagtccatctccaaagccctggtggcctattaccagaaatatgtggatgaggcttccaagaaggagatcaaagacatcctcatccagtatgaccggaccctgctggtagctgaccctcgtcgctgcgagtccaaaaagtttggaggccctggtgcccgcgctcgctaccagaaatcctaccgataagcccatcgtgactcaaaactcacttgtataataaacagtttttgagggattttaaagtttcaagaagaaaagcggccagggtggcccctagctttccttttccggttgcggcgccgcgcggtgaggttgtctagtccacgctcggagccatgccgtccaagggcccgctgcagtctgtgcaggtcttcggacgcaagaagacagcgacagctgtggcgcactgcaaacgcggcaatggtctcatcaaggtgaacgggcggcccctggagatgattgagccgcgcacgctacagtacaagctgctggagccagttctgcttctcggcaaggagcgatttgctggtgtagacatccgtgtccgtgtaaagggtggtggtcacgtggcccagatttatgctatccgtcagtccatctccaaagccctggtggcctattaccagaaatatgtggatgaggcttccaagaaggagatcaaagacatcctcatccagtatgaccggaccctgctggtagctgaccctcgtcgctgcgagtccaaaaagtttggaggccctggtgcccgcgctcgctaccagaaatcctaccgataagcccatcgtgactcaaaactcacttgtataataaacagtttttgagggattttaaagtttcaagaagaaaagcggccagggtggcccctagctttccttttccggttgcggcgccgcgcggtgaggttgtctagtccacgctcggagccatgccgtccaagggcccgctgcagtctgtgcaggtcttcggacgcaagaagacagcgacagctgtggcgcactgcaaacgcggcaatggtctcatcaaggtgaacgggcggcccctggagatgattgagccgcgcacgctacagtacaagctgctggagccagttctgcttctcggcaaggagcgatttgctggtgtagacatccgtgtccgtgtaaagggtggtggtcacgtggcccagatttatgctatccgtcagtccatctccaaagccctggtggcctattaccagaaatatgtggatgaggcttccaagaaggagatcaaagacatcctcatccagtatgaccggaccctgctggtagctgaccctcgtcgctgcgagtccaaaaagtttggaggccctggtgcccgcgctcgctaccagaaatcctaccgataagcccatcgtgactcaaaactcacttgtataataaacagtttttgagggattttaaagtttcaagaa

SEQ ID NO: 883 - DNA, 3300 bp, Homo sapiens; identical to SEQ ID NO: 882
  misc_feature (654)..(654): second gene starts at position 654

SEQ ID NO: 884 - DNA, 3300 bp, Homo sapiens; identical to SEQ ID NO: 882
  misc_feature (654)..(654): second gene starts at position 654

SEQ ID NO: 885 - DNA, 3300 bp, Homo sapiens; identical to SEQ ID NO: 882
  misc_feature (654)..(654): second gene starts at position 654

SEQ ID NO: 886 - DNA, 3300 bp, Homo sapiens; identical to SEQ ID NO: 882
  misc_feature (654)..(654): second gene starts at posiition 654

SEQ ID NO: 887 - DNA, 3300 bp, Homo sapiens; identical to SEQ ID NO: 882
  misc_feature (654)..(654): second gene starts at position 654

SEQ ID NO: 888 - DNA, 3300 bp, Homo sapiens; identical to SEQ ID NO: 882
  misc_feature (654)..(654): second gene starts at position 654

SEQ ID NO: 889 - DNA, 3300 bp, Homo sapiens; identical to SEQ ID NO: 882
  misc_feature (654)..(654): second gene starts at position 654

SEQ ID NO: 890 - DNA, 8515 bp, Homo sapiens
  misc_feature (158)..(158): second gene starts at position 158
atgtctatggatgtgacattcctggggacgggtgcagcatacccatctccaacccggggtgcctctgctgtggtccttcggtgtgaaggcgagtgctggctctttgactgtggggagggaacacagacacagcttatgaaaagccaacttaaagcaggttatcctgaatacatgtctaacaattttccttgcaacgttagctgttgtttttcactgtttccaaaggatcaaaattgcttcagaaattggagacatatttgatttaaaaggaaaaacttgaacaaatggacaatatgtctattacgaatacaccaacaagtaatgatgcctgtctgagcattgtgcatagtttgatgtgccatagacaaggtggagagagtgaaacatttgcaaaaagagcaattgaaagtttggtaaagaagctgaaggagaaaaaagatgaattggattctttaataacagctataactacaaatggagctcatcctagtaaatgtgttaccatacagagaacattggatgggaggcttcaggtggctggtcggaaaggatttcctcatgtgatctatgcccgtctctggaggtggcctgatcttcacaaaaatgaactaaaacatgttaaatattgtcagtatgcgtttgacttaaaatgtgatagtgtctgtgtgaatccatatcactacgaacgagttgtatcacctggaattgatctctcaggattaacactgcagagtaatgctccatcaagtatgatggtgaaggatgaatatgtgcatgactttgagggacagccatcgttgtccactgaaggacattcaattcaaaccatccagcatccaccaagtaatcgtgcatcgacagagacatacagcaccccagctctgttagccccatctgagtctaatgctaccagcactgccaactttcccaacattcctgtggcttccacaagtcagcctgccagtatactggggggcagccatagtgaaggactgttgcagatagcatcagggcctcagccaggacagcagcagaatggatttactggtcagccagctacttaccatcataacagcactaccacctggactggaagtaggactgcaccatacacacctaatttgcctcaccaccaaaacggccatcttcagcaccacccgcctatgccgccccatcccggacattactggcctgttcacaatgagcttgcattccagcctcccatttccaatcatcctgctcctgagtattggtgttccattgcttactttgaaatggatgttcaggtaggagagacatttaaggttccttcaagctgccctattgttactgttgatggatacgtggacccttctggaggagatcgcttttgtttgggtcaactctccaatgtccacaggacagaagccattgagagagcaaggttgcacataggcaaaggtgtgcagttggaatgtaaaggtgaaggtgatgtttgggtcaggtgccttagtgaccacgcggtctttgtacagagttactacttagacagagaagctgggcgtgcacctggagatgctgttcataagatctacccaagtgcatatataaaggtctttgatttgcgtcagtgtcatcgacagatgcagcagcaggcggctactgcacaagctgcagcagctgcccaggcagcagccgtggcaggaaacatccctggcccaggatcagtaggtggaatagctccagctatcagtctgtcagctgctgctggaattggtgttgatgaccttcgtcgcttatgcatactcaggatgagttttgtgaaaggctggggaccggattacccaagacagagcatcaaagaaacaccttgctggattgaaattcacttacaccgggccctccagctcctagacgaagtacttcataccatgccgattgcagacccacaacctttagactgaggtcttttaccgttggggcccttaaccttatcaggatggtggactacaaaatacaatcctgtttataatctgaagatatatttcacttttgttctgctttatcttttcataaagggttgaaaatgtgtttgctgccttgctcctagcagacagaaactggattaaaacaattttttttttcctcttcagaacttgtcaggcatggctcagagcttgaagattaggagaaacacattcttattaattcttcacctgttatgtatgaaggaatcattccagtgctagaaaatttagccctttaaaacgtcttagagccttttatctgcagaacatcgatatgtatatcattctacagaataatccagtattgctgattttaaaggcagagaagttctcaaagttaattcacctatgttattttgtgtacaagttgttattgttgaacatacttcaaaaataatgtgccatgtgggtgagttaattttaccaagagtaactttactctgtgtttaaaaagtaagttaataatgtattgtaatctttcatccaaaatattttttgcaagttatattagtgaagatggtttcaattcagattgtcttgcaacttcagttttatttttgccaaggcaaaaaactcttaatctgtgtgtatattgagaatcccttaaaattaccagacaaaaaaatttaaaattacgtttgttattcctagtggatgactgttgatgaagtatacttttcccctgttaaacagtagttgtattcttctgtatttctaggcacaaggttggttgctaagaagcctataagaggaatttcttttccttcattcatagggaaaggttttgtattttttaaaacactaaaagcagcgtcactctacctaatgtctcactgttctgcaaaggtggcaatgcttaaactaaataatgaataaactgaatattttggaaactgctaaattctatgttaaatactgtgcagaataatggaaacattacagttcataataggtagtttggatatttttgtacttgatttgatgtgactttttttggtataatgtttaaatcatgtatgttatgatattgtttaaaattcagtttttgtatcttggggcaagactgcaaacttttttatatcttttggttattctaagccctttgccatcaatgatcatatcaattggcagtgactttgtatagagaatttaagtagaaaagttgcagatgtattgactgtaccacagacacaatatgtatgctttttacctagctggtagcataaataaaactgaatctcaacatacaaagttgaattctaggtttgatttttaagattttttttttcttttgcacttttgagtccaatctcagtgatgaggtaccttctactaaatgacaggcaacagccagttctattgggcagctttgtttttttccctcacactctaccgggacttccccatggacattgtgtatcatgtgtagagttggttttttttttttttaatttttattttactatagcagaaatagacctgattatctacaagatgataaatagattgtctacaggataaatagtatgaaataaaatcaaggattatctttcagatgtgtttacttttgcctggagaacttttagctatagaaacacttgtgtgatgatagtcctccttatatcacctggaatgaacacagcttctactgccttgctcagaaggtcttttaaatagaccatcctagaaaccactgagtttgcttatttctgtgatttaaacatagatcttgatccaagctacatgacttttgtctttaaataacttatctaccacctcatttgtactcttgattacttacaaattctttcagtaaacacctaattttcttctgtaaaagtttggtgatttaagttttattggcagttttataaaaagacatcttctctagaaattgctaactttaggtccattttactgtgaatgaggaataggagtgagttttagaataacagatttttaaaaatccagatgatttgattaaaaccttaatcatacattgacataattcattgcttcttttttttgagatatggagtcttgctgtgttgcccaggcaggagtgcagtggtatgatctcagctcactgcaacctctgcctcccgggttcaactgattctcctgcctcagcctccctggtagctaggattacaggtgcccgccaccatgcctggctaacttttgtagttttagtagagacggggttttgcctgttggccaggctggtcttgaactcctgacctcaagtgatccatccaccttggcctcccaaagtgctgggattacgggcgtgagccactgtccctggcctcattgttcccttttctactttaaggaaagttttcatgtttaatcatctggggaaagtatgtgaaaaatatttgttaagaagtatctctttggagccaagccacctgtcttggtttctttctactaagagccataaagtatagaaatacttctagttgttaagtgcttatatttgtacctagatttagtcacacgcttttgagaaaacatctagtatgttatgatcagctattcctgagagcttggttgttaatctatatttctatttcttagtggtagtcatctttgatgaataagactaaagattctcacaggtttaaaattttatgtctactttaagggtaaaattatgaggttatggttctgggtgggttttctctagctaattcatatctcaaagagtctcaaaatgttgaatttcagtgcaagctgaatgagagatgagccatgtacacccaccgtaagacctcattccatgtttgtccagtgcctttcagtgcattatcaaagggaatccttcatggtgttgcctttattttccggggagtagatcgtgggatatagtctatctcatttttaatagtttaccgcccctggtatacaaagataatgacaataaatcactgccatataaccttgctttttccagaaacatggctgttttgtattgctgtaaccactaaataggttgcctataccattcctcctgtgaacagtgcagatttacaggttgcatggtctggcttaaggagagccatacttgagacatgtgagtaaactgaactcatattagctgtgctgcatttcagacttaaaatccatttttgtggggcagggtgtggtgtgtaaaggggggtgtttgtaatacaagttgaaggcaaaataaaatgtcctgtctcccagatgatatacatcttattatttttaaagtttattgctaattgtaggaaggtgagttgcaggtatctttgactatggtcatctggggaaggaaaattttacattttactattaatgctccttaagtgtctatggaggttaaagaataaaatggtaaatgtttctgtgcctggtttgatggtaactggttaatagttactcaccattttatgcagagtcacattagttcacaccctttctgagagccttttgggagaagcagttttattctctgagtggaacagagttctttttgttgataatttctagtttgctcccttcgttattgccaactttactggcattttatttaatgatagcagattgggaaaatggcaaatttaggttacggaggtaaatgagtatatgaaagcaattacctctaaagccagttaacaattattttgtaggtggggtacactcagcttaaagtaatgcatttttttttcccgtaaaggcagaatccatcttgttgcagatagctatctaaataatctcatatcctcttttgcaaagactacagagaataggctatgacaatcttgttcaagcctttccatttttttccctgataactaagtaatttctttgaacataccaagaagtatgtaaaaagtccatggccttattcatccacaaagtggcatcctaggcccagccttatccctagcagttgtcccagtgctgctaggttgcttatcttgtttatctggaatcactgtggagtgaaattttccacatcatccagaattgccttatttaagaagtaaaacgttttaatttttagcctttttttggtggagttatttaatatgtatatcagaggatatactagatggtaacatttctttctgtgcttggctatctttgtggacttcaggggcttctaaaacagacaggactgtgttgcctttactaaatggtctgagacagctatggttttgaatttttagttttttttttttaacccacttcccctcctggtctcttccctctctgataattaccattcatatgtgagtgttagtgtgcctccttttagcattttcttcttctctttctgattcttcatttctgactgcctaggcaaggaaaccagataaccaaacttactagaacgttctttaaaacacaagtacaaactctgggacaggacccaagacactttcctgtgaagtgctgaaaaagacctcattgtattggcatttgatatcagtttgatgtagcttagagtgcttcctgattcttgctgagtttcaggtagttgagatagagagaagtgagtcatattcatattttcccccttagaataatattttgaaaggtttcattgcttccacttgaatgctgctcttacaaaaactggggttacaagggttactaaattagcatcagtagccagaggcaataccgttgtctggaggacaccagcaaacaacacacaacaaagcaaaacaaaccttgggaaactaaggccatttgttttgttttggtgtcccctttgaagccctgccttctggccttactcctgtacagatatttttgacctataggtgcctttatgagaattgagggtctgacatcctgccccaaggagtagctaaagtaattgctagtgttttcagggattttaacatcagactggaatgaatgaatgaaactttttgtcctttttttttctgtttttttttttctaatgtagtaaggactaaggaaaacctttggtgaagacaatcatttctctctgttgatgtggatacttttcacaccgtttatttaaatgctttctcaataggtccagagccagtgttcttgttcaacctgaaagtaatggctctgggttgggccagacagttgcactctctagtttgccctctgccacaaatttgatgtgtgacctttgggcaagtcatttatcttctctgggccttagttgcctcatctgtaaaatgagggagttggagtagattaattattccagctctgaaattctaagtgaccttggctaccttgcagcagttttggatttcttccttatctttgttctgctgtttgagggggctttttacttatttccatgttattcaaaggagactaggcttgatattttattactgttcttttatggacaaaaggttacatagtatgcccttaagacttaattttaaccaaaggcctagcaccaccttaggggctgcaataaacacttaacgcgcgtgcgcacgcgcgcgcgcacacacacacacacacacacacacacacacaggtcagagtttaaggctttcgagtcatgacattctagcttttgaattgcgtgcacacacacacgcacgcacacactctggtcagagtttattaaggctttcgagtcatgacattatagcttttgagttggtgtgtgtgacaccaccctcctaagtggtgtgtgcttgtaattttttttttcagtgaaaatggattgaaaacctgttgttaatgcttagtgatattatgctcaaaacaaggaaattcccttgaaccgtgtcaattaaactggtttatatgactcaagaaaacaataccagtagatgattattaactttattcttggctctttttaggtccattttgattaagtgacttttggctggatcattcagagctctcttctagcctacccttggatgagtacaattaatgaaattcatattttcaaggacctgggagccttccttggggctgggttgagggtggggggttggggagtcctggtagaggccagctttgtggtagctggagaggaagggatgaaaccagctgctgttgcaaaggctgcttgtcattgatagaaggactcacgggcttggattgattaagactaaacatggagttggcaaactttcttcaagtattgagttctgttcaatgcattggacatgtgatttaagggaaaagtgtgaatgcttatagatgatgaaaacctggtgggctgcagagcccagtttagaagaagtgagttgggggttggggacagatttggtggtggtatttcccaactgtttcctcccctaaattcagaggaatgcagctatgccagaagccagagaagagccactcgtagcttctgctttggggacaactggtcagttgaaagtcccaggagttcctttgtggctttctgtatacttttgcctggttaaagtctgtggctaaaaaatagtcgaacctttcttgagaactctgtaacaaagtatgtttttgattaaaagagaaagccaact

SEQ ID NO: 891 - DNA, 2467 bp, Homo sapiens
  misc_feature (1077)..(1077): second gene starts at position 1077
atgctgctatccgtgccgctgctgctcggcctcctcggcctggccgtcgccgagcctgccgtctacttcaaggagcagtttctggacggagacgggtggacttcccgctggatcgaatccaaacacaagtcagattttggcaaattcgttctcagttccggcaagttctacggtgacgaggagaaagataaaggtttgcagacaagccaggatgcacgcttttatgctctgtcggccagtttcgagcctttcagcaacaaaggccagacgctggtggtgcagttcacggtgaaacatgagcagaacatcgactgtgggggcggctatgtgaagctgtttcctaatagtttggaccagacagacatgcacggagactcagaatacaacatcatgtttggtcccgacatctgtggccctggcaccaagaaggttcatgtcatcttcaactacaagggcaagaacgtgctgatcaacaaggacatccgttgcaaggatgatgagtttacacacctgtacacactgattgtgcggccagacaacacctatgaggtgaagattgacaacagccaggtggagtccggctccttggaagacgattgggacttcctgccacccaagaagataaaggatcctgatgcttcaaaaccggaagactgggatgagcgggccaagatcgatgatcccacagactccaagcctgaggactgggacaagcccgagcatatccctgaccctgatgctaagaagcccgaggactgggatgaagagatggacggagagtgggaacccccagtgattcagaaccctgagtacaagggtgagtggaagccccggcagatcgacaacccagattacaagggcacttggatccacccagaaattgacaaccccgagtattctcccgatcccagtatctatgcctatgataactttggcgtgctgggcctggacctctggcaggtcaagtctggcaccatctttgacaacttcctcatcaccaacgatgaggcatacgctgaggagtttggcaacgagacgtggggcgtaacaaaggcagcagagaaacaaatgaaggatcttctacaaatgtagaggtttatttcaacaaaatgtgtaaagagtgcatctgaagctcctgctcatcacagtatgtgtccatcaaattctgagacaagtgaaggctgttttgtgaacgaagagaacagataatatggcggtctccgtccaagcaggtcttggtcaatatccatcatttatactcctcctgccttagtagccttgcatgtttgaggggctgtgggaatgtcagattgctcatgttctgtgcctccaacttgaaaaaatccttgtccagggtaagacctacagtaaggagctctggggatgggggaggaggcattacagggttctagagaggaaacatactcgtttgtgtcataatttggtggggagaggggaggtaaatgagtgtaacccaccctgcctctgaagacatgcctggacaggcctcctggggggtgcaggacttcataccacttgtagatatgtgggatttgatttattgcaaaaaagcatagaagaataatctggtcaaaaatgaatccaattcttactaggtaagcaaatagccagcaatggtcaatgcattttcctggactgagaattgtcccccaccactttatgcccttttctgaaggtgctgaacacctgtaccttccaccagggcagccgggctgaggctctgactcctgggggctgtccgctccatacccagccatacagtgcccacctgcaacccagaaccattgaaaagtccagccaatctatccgcacagattcctcctgaagaaggggaggtggagctcgttcttgtgtgcaaactacagggttaaggctcagaactgtggcttgtccaagaacgttcataccactgcttctcaaatgtcttagtgatttcctccttggtcatcagtgacaaatgcagttagctgcactaaaggaaccggatgctacaccagccctgatcacctgccactcttgctttaggaacagaggaatcagtaagttcttttcttgaataaactagttgttgaaagtaaactctctccaccacctgaggaagcccctgatgccagtcaggaggggccagtaagcctggaggacagcagcaccatgactgagttgtaaataatcttaaggtcatgtggattctgtgtttcctggaagcctccctcatcaggaaggccagctcctggtgctgagggtgtagctgtcaccagggtcctttcagagctgtggggagacctgctgcctgtctacactctggggaagagagtagaaccgttagctgctaggacagtaatcctggaactagggaagagtgagtgtggaggcaccattaacctctcaaaaccatccaagctccaggcttcataggaacaactttccaagtcctcaaaacaaacag

SEQ ID NO: 892 - DNA, 2467 bp, Homo sapiens; identical to SEQ ID NO: 891
  misc_feature (1077)..(1077): second gene starts at position 1077

SEQ ID NO: 893 - DNA, 2467 bp, Homo sapiens; identical to SEQ ID NO: 891
  misc_feature (1077)..(1077): second gene starts at position 1077

SEQ ID NO: 894 - DNA, 2467 bp, Homo sapiens; identical to SEQ ID NO: 891
  misc_feature (1077)..(1077): second gene starts at position 1077

SEQ ID NO: 895 - DNA, 2467 bp, Homo sapiens; identical to SEQ ID NO: 891
  misc_feature (1077)..(1077): second gene starts at position 1077

SEQ ID NO: 896 - DNA, 6872 bp, Homo sapiens
  misc_feature (983)..(983): second gene starts at position 983
atgatgttgggcacggaaggtggagagggattcgtggtgaaggtccggggcttgccctggtcttgctcggccgatgaagtgcagaggtttttttctgactgcaaaattcaaaatggggctcaaggtattcgtttcatctacaccagagaaggcagaccaagtggcgaggcttttgttgaacttgaatcagaagatgaagtcaaattggccctgaaaaaagacagagaaactatgggacacagatatgttgaagtattcaagtcaaacaacgttgaaatggattgggtgttgaagcatactggtccaaatagtcctgacacggccaatgatggctttgtacggcttagaggacttccctttggatgtagcaaggaagaaattgttcagttcttctcagggttggaaatcgtgccaaatgggataacattgccggtggacttccaggggaggagtacgggggaggccttcgtgcagtttgcttcacaggaaatagctgaaaaggctctaaagaaacacaaggaaagaatagggcacaggtatattgaaatctttaagagcagtagagctgaagttagaactcattatgatccaccacgaaagcttatggccatgcagcggccaggtccttatgacagacctggggctggtagagggtataacagcattggcagaggagctggctttgagaggatgaggcgtggtgcttatggtggaggctatggaggctatgatgattacaatggctataatgatggctatggatttgggtcagatagatttggaagagacctcaattactgtttttcaggaatgtctgatcacagatacggggatggtggctctactttccagagcacaacaggacactgtgtacacatgcggggattaccttacagagctactgagaatgacatttataattttttttcaccgctcaaccctgtgagagtacacattgaaattggtcctgatggcagagtaatcaccagtcctcttccttcacttcttgttgtaattgcagccattttcattggattctttctagggaaattcatcttgtagagtgaagcatgcagagtgctgtttctttttttttttttctcttgaccagaaaaagatttgtttacctaccatttcattggtagtatggcccacggtgaccatttttttgtgtgtacagcgtcatataggctttgcctttaatgatctcttacggttagaaaacacaataaaaacaaactgttcggctactggacaggttgtatattaccagatcatcactagcagatgtcagttgcacattgagtcctttatgaaattcataaataaagaattgttctttctttgtggttttaataagagttcaagaattgttcagagtcttgtaaatgttattttaataatccctttaaattttatctgttgctgttacctcttgaaatatgatttatttagattgctaatcccactcattcaggaaatgccaagaggtattccttggggaaatggtgcctcttacagtgtaaatttttcctcctttacctttgctaatatcatggcagaatttttcttatcccttgtgaggcagttgttgactgagtttttcatccttacaatcctgtcccatggtatttaacataaaaaaaaataaaactgttaacagattcttgctcgatagcttgtttgtgtctgtcgtgttattagagggaactccactatatatggtcacttgaaattatgatgcaaaggtttctcttgcattgaaaccctcttggatattacagtatttttaattgaaagtcctaattctgttaaggaaaggagttgattaaattttaaggtaccactggtattttgggagattataatcagtttgttttcaagataatagaaaataaggtccatgagaatagaagttatgtgatttcagtgagttgatgtgtacagcatggctgtgctccatctgatttaccccattcttaagttctgagagtatgttctcaaggaagatttaactctctttggttttaaattactttttaaccagcctaataaataagtcttactacttttcataatatttcataatagttaaaagtaggtgtttttttcgtgctcaatttggcactcaaaataatgttcattatggaagtttggtaatactgagcaagcctgtggaattttctttatgaaaaatgattttagcctttgcaaatgttaaccatgtgaaacacattttcagtataagtatgcgttacagggtttgatactttcctgcacttaggtttgtcctattcttcatttattcatactaggatagaaaattttggaatcagaaaatagatccagtgtttagctacatacaatctagtacaagtgaatttttattcttaaacataggtgtgttggctctttttttaaaagatgcgctctacctgaaaaggaaattggattttagaactggatgtggtgcagtgaagtattttaggcccaggtctgtgtacacattttatagaagaatgaagtactctgaagtattttggttgccttttcatttcaactgtgttttgaatttgtcagatcacacatatattgtgttattgggcgctgtggtatcttttataaaacctcttgcttgtgtgcaaaagttcctaaaaggaaacacaagtaatgcctatccattactagcatgctatgctgcatgctttactgccattgctgtatgctttactgtctttgtaaaaatccccctctccccttttctggtaactggaaaagcatgctaaaaatagtcttatattttcaccccataaatgcagaatcagtaattccttggcttaaagctcttatataatcaatattattggtggtaaataccaagtttggtatctcatagctatctttttttaaagaaattaagttcttgaaaatttagccaaatcccgttttatgggaatgctctttagaattcattttgttcagcccctttgttctatggttgagaaatctgaggccttacgaaggttaagagaactttccccgtgtctcacaggtaggtagaggcagagctggaactagatatctggtctgttgactctagctcagtgtcttctggtaactgttgaaaattgtcttagtttgagagatggctgaaataatgaacataaaatgctatttataataacaagtatatgtgaaatttcttattgtaagactactaccggcttactgttgaatagtttggttatagtgtttaggctagaaatgcctcccacattggtaataaacattacaaaatacaatgtatttttaggtaggcattttataaaatgcattatgccatggttgcttttgagatagattgtagtctgggtagcatctttaaaatgtatgtgggcttaactgttgttcatatcaggagatgctctgattgtataggtgagactctgtttctgttatttttaattgctgtatgaaatgtgatcagattattttactaccaacagttatagtttgaaagtccaactgtattaattgactgataatatgataatatagagattaaattgtttgtcttcattccttatatgtttagaagtttttgctttgtctgcctgcttacttgtatatgtaagcatgagggaaatacactgttgctaatactgaaattacaatcaagtaactaaggccttgagttcatatgtgacactgaatgcactagcttccttcgttctataactaatgtaccttaacttcccccattcttatatttacaagaagctaagtcattatgttctgagtgtgtggtatgttcccttaaaaaaaaatgacacttggaagaaaaatgtatgaaattcagaaattccgatcaaagaaaagtaattctttctttttttttttgagacagagtcttgctttgttgcccaggctggagggcagtggtgtgatctcacctcactgcagcttccgcctcctgggttcaagtgattctcatggctcagccgcctgagtagctgggattacaggtgtgagccaacaagcccggctaatttttgtatttttagtagagacaaggtttcaccatgttggtcaggctgggctcaaactcctgaatccgcctgcctcggcctcccaaagtgctgggattacaggtgtgagctgccgcacccagccaagaaaaataatactcttaaatacttagatgttcacctaaagttgatattatttggtatgggaattacttttgaactgtaatctttcagattacaccactttgaaaacaagttttaacagtagggtaaaaatatagtttttgagggtattcccaacttgtgatcttctaccactttagagacattcaagtaatagttttcttagagctttgcacattcctattcactgagattttaaaaatttcacctttattcgagggaaggatcaatgcttattaccatttggaaaaacgaagatcagaaggtaaatgatctttattttctagctttaaagggaaattaaaccattcatgaataaactttaaaaatgtgaagtgtccttttccttttcacaatacaaaaaaaatttcaacagattgtgtggtttgtgcatttatatcctgttaagcattaatagctaatcactgggacttgaattctgatggcagatagtctcttgcttagtgagatggagttaactattttttagtaggaagtgagaacagctgattttcatgccacgtttcatagccccacttttggtagactaccaccacgcttcttcgcgtaagcagtggcatcttgggaatgaatgcccagccgctcgtgggttggtgcaaagaagtataaacatatatcactaaggaaaaagaaagtttgtcttgcccttctgacacagtgtgtgcacttcaggcaatttttggaaaatataaaaaattccaaattctgcctttcagcagcatcaattgctaggaacatttcattcatttccctgtaatattaatgttctttaagcataatcactaattataagttgtatcctatttttttccagcttaatttctgtggtttattgaaaaccaagtataaatgtgactaaaagcattttgctttgtttttatagttaactttcttaaggttatggacattttataatgtaacatttgattggcctggcctcttgacaattcccttctagttatgcatatcctcctgttgccacatttcttgttttaaaactcagtttcttgttttccagttgttgctatgtataacacccatcttgaaagagagtatataggaagttattcagataacttttgtagtagtgatattcaactatagcagtaccttaactcatgatgagcttaggaacataaaagataattgttgcttgaatagcacccccagagatactgacctaattggtctggggtggagatctggcatggtagtttttttcaagctccaatcatcggccagacagttgctttatgtaggtttttaaatgccaaaggcagatatgaagtagatttaattaagacttgacttcagcaatacaggggaacttaaaatacttatttttctttaaactgcaggagtcactgttaggtattgcttaaaaaaaattgcataaaagctttgcttgtcaagttaggattgctggaataccactaaagatttttgacttgtgaataaatgagctgtcatcgcaaaaaggcgatttgagaaatgtgggcttcagtattaattgccattttgctgacacccagtgtacctacctacctgagaaatttattttgtccatcatgtatttctcaaagcaaaaggtggttttcaagtataatgtcgttttcaacatgcttattacttagttttacgtcagctcatttcatcatcattgataacttgtgaaatacttatctccatcctatggaataggggagacgggtttagacaggttcaattagctcaagtctacacagctgaagtagcagagaaagtgggatctagatggtctgatcctagtgatctaccatatgaaggacatagtttgtgtcctggtccaagtcaaatattgactcctcacaaacagtaagtatggcaattttgtgatgcctttgattccactttacatggagtactattatttgtgaaatgtctttaagatttttggtcttaaatttttgaagactgctttccccctttatctcccagaaaattgagaagaagtaaactcctgcccactaacaatctcagtccgtgaacaaaaccaacatgaacattcctaaacaagagtgtgtgttactctaagaagaaggctatagaatttatggaaatggcttatgtaacctacaagactggagaacagaatgtgactggccttttctaatggtcctttaagatttaatgattaaagcaagagttttttataattgactttgtggtctaaattcttgatactgtttataattctacaaagaacaaaaattgttatgtactataggcacttaagaaccctgaggaaaaataatacaatgtgtgtgtgtgagagagagagtgagttactgacattgttccaaaaaaaaaaaaaaaaaaaaaaaaaatgtggagggttgaaatggtaaggaattggaatcttttgtattttcgagcaataagaattcctattcttgtttcaaatagaggtttgttaggaattacagttgtggggagcaaactttcttttttgtgctgttttaattcaaaatgtatatccttaattgtatataatatgtagataaatatatgagggtattaagctactttgaattaaatttaaggatatatttcacatgaaaacaaatacaaacgagaatcaaaataaagttttgcaaagta

SEQ ID NO: 897 - DNA, 6872 bp, Homo sapiens; identical to SEQ ID NO: 896
  misc_feature (983)..(983): second gene starts at position 983

SEQ ID NO: 898 - DNA, 32765 bp, Homo sapiens
  misc_feature (16)..(16): second gene starts at position 16
atggctccctggcctgaattgggagatgcccagcccaaccccgataagtacctcgaaggggccgcaggtcagcagcccactgcccctgataaaagcaaagagaccaacaaaacagataacactgaggcacctgtaaccaagattgaacttctgccgtcctactccacggctacactgatagatgagcccactgaggtggatgacccctggaacctacccactcttcaggactcggggatcaagtggtcagagagagacaccaaagggaagattctctgtttcttccaagggattgggagattgattttacttctcggatttctctactttttcgtgtgctccctggatattcttagtagcgccttccagctggttggaggaaaaatggcaggacagttcttcagcaacagctctattatgtccaaccctttgttggggctggtgatcggggtgctggtgaccgtcttggtgcagagctccagcacctcaacgtccatcgttgtcagcatggtgtcctcttcattgctcactgttcgggctgccatccccattatcatgggggccaacattggaacgtcaatcaccaacactattgttgcgctcatgcaggtgggagatcggagtgagttcagaagagcttttgcaggagccactgtccatgacttcttcaactggctgtccgtgttggtgctcttgcccgtggaggtggccacccattacctcgagatcataacccagcttatagtggagagcttccacttcaagaatggagaagatgccccagatcttctgaaagtcatcactaagcccttcacaaagctcattgtccagctggataaaaaagttatcagccaaattgcaatgaacgatgaaaaagcgaaaaacaagagtcttgtcaagatttggtgcaaaacttttaccaacaagacccagattaacgtcactgttccctcgactgctaactgcacctccccttccctctgttggacggatggcatccaaaactggaccatgaagaatgtgacctacaaggagaacatcgccaaatgccagcatatctttgtgaatttccacctcccggatcttgctgtgggcaccatcttgctcatactctccctgctggtcctctgtggttgcctgatcatgattgtcaagatcctgggctctgtgctcaaggggcaggtcgccactgtcatcaagaagaccatcaacactgatttcccctttccctttgcatggttgactggctacctggccatcctcgtcggggcaggcatgaccttcatcgtacagagcagctctgtgttcacgtcggccttgacccccctgattggaatcggcgtgataaccattgagagggcttatccactcacgctgggctccaacatcggcaccaccaccaccgccatcctggccgccttagccagccctggcaatgcattgaggagttcactccagatcgccctgtgccactttttcttcaacatctccggcatcttgctgtggtacccgatcccgttcactcgcctgcccatccgcatggccaaggggctgggcaacatctctgccaagtatcgctggttcgccgtcttctacctgatcatcttcttcttcctgatcccgctgacggtgtttggcctctcgctggccggctggcgggtgctggttggtgtcggggttcccgtcgtcttcatcatcatcctggtactgtgcctccgactcctgcagtctcgctgcccacgcgtcctgccgaagaaactccagaactggaacttcctgccgctgtggatgcgctcgctgaagccctgggatgccgtcgtctccaagttcaccggctgcttccagatgcgctgctgctgctgctgccgcgtgtgctgccgcgcgtgctgcttgctgtgtgactgccccaagtgctgccgctgcagcaagtgctgcgaggacttggaggaggcgcaggaggggcaggatgtccctgtcaaggctcctgagacctttgataacataaccattagcaggcggttccgctgccctgaggcactcttccagccttccttcctgggcatggagtcctgtggcatccacgaaactaccttcaactccatcatgaagtgtgacgtggacatccgcaaagacctgtacgccaacacagtgctgtctggcggcaccaccatgtaccctggcattgccgacaggatgcagaaggagatcactgccctggcacccagcacaatgaagatcaagatcattgctcctcctgagcgcaagtactccgtgtggatcggcggctccatcctggcctcgctgtccaccttccagcagatgtggatcagcaagcaggagtatgacgagtccggcccctccatcgtccaccgcaaatgcttctaggcggactatgacttagttgcgttacaccctttcttgacaaaacctaacttgcgcagaaaacaagatgagattggcatggctttatttgttttttttgttttgttttggttttttttttttttttggcttgactcaggatttaaaaactggaacggtgaaggtgacagcagtcggttggagcgagcatcccccaaagttcacaatgtggccgaggactttgattgcacattgttgtttttttaatagtcattccaaatatgagatgcgttgttacaggaagtcccttgccatcctaaaagccaccccacttctctctaaggagaatggcccagtcctctcccaagtccacacaggggaggtgatagcattgctttcgtgtaaattatgtaatgcaaaatttttttaatcttcgccttaatacttttttattttgttttattttgaatgatgagccttcgtgcccccccttcccccttttttgtcccccaacttgagatgtatgaaggcttttggtctccctgggagtgggtggaggcagccagggcttacctgtacactgacttgagaccagttgaataaaagtgcacaccttaaaaatgaaccgccgagaccgcgtccgccccgcgagcacagagcctcgcctttgccgatccgccgcccgtccacacccgccgccagctcaccatggatgatgatatcgccgcgctcgtcgtcgacaacggctccggcatgtgcaaggccggcttcgcgggcgacgatgccccccgggccgtcttcccctccatcgtggggcgccccaggcaccagggcgtgatggtgggcatgggtcagaaggattcctatgtgggcgacgaggcccagagcaagagaggcatcctcaccctgaagtaccccatcgagcacggcatcgtcaccaactgggacgacatggagaaaatctggcaccacaccttctacaatgagctgcgtgtggctcccgaggagcaccccgtgctgctgaccgaggcccccctgaaccccaaggccaaccgcgagaagatgacccagatcatgtttgagaccttcaacaccccagccatgtacgttgctatccaggctgtgctatccctgtacgcctctggccgtaccactggcatcgtgatggactccggtgacggggtcacccacactgtgcccatctacgaggggtatgccctcccccatgccatcctgcgtctggacctggctggccgggacctgactgactacctcatgaagatcctcaccgagcgcggctacagcttcaccaccacggccgagcgggaaatcgtgcgtgacattaaggagaagctgtgctacgtcgccctggacttcgagcaagagatggccacggctgcttccagctcctccctggagaagagctacgagctgcctgacggccaggtcatcaccattggcaatgagcggttccgctgccctgaggcactcttccagccttccttcctgggcatggagtcctgtggcatccacgaaactaccttcaactccatcatgaagtgtgacgtggacatccgcaaagacctgtacgccaacacagtgctgtctggcggcaccaccatgtaccctggcattgccgacaggatgcagaaggagatcactgccctggcacccagcacaatgaagatcaagatcattgctcctcctgagcgcaagtactccgtgtggatcggcggctccatcctggcctcgctgtccaccttccagcagatgtggatcagcaagcaggagtatgacgagtccggcccctccatcgtccaccgcaaatgcttctaggcggactatgacttagttgcgttacaccctttcttgacaaaacctaacttgcgcagaaaacaagatgagattggcatggctttatttgttttttttgttttgttttggttttttttttttttttggcttgactcaggatttaaaaactggaacggtgaaggtgacagcagtcggttggagcgagcatcccccaaagttcacaatgtggccgaggactttgattgcacattgttgtttttttaatagtcattccaaatatgagatgcgttgttacaggaagtcccttgccatcctaaaagccaccccacttctctctaaggagaatggcccagtcctctcccaagtccacacaggggaggtgatagcattgctttcgtgtaaattatgtaatgcaaaatttttttaatcttcgccttaatacttttttattttgttttattttgaatgatgagccttcgtgcccccccttcccccttttttgtcccccaacttgagatgtatgaaggcttttggtctccctgggagtgggtggaggcagccagggcttacctgtacactgacttgagaccagttgaataaaagtgcacaccttaaaaatgaaccgccgagaccgcgtccgccccgcgagcacagagcctcgcctttgccgatccgccgcccgtccacacccgccgccagctcaccatggatgatgatatcgccgcgctcgtcgtcgacaacggctccggcatgtgcaaggccggcttcgcgggcgacgatgccccccgggccgtcttcccctccatcgtggggcgccccaggcaccagggcgtgatggtgggcatgggtcagaaggattcctatgtgggcgacgaggcccagagcaagagaggcatcctcaccctgaagtaccccatcgagcacggcatcgtcaccaactgggacgacatggagaaaatctggcaccacaccttctacaatgagctgcgtgtggctcccgaggagcaccccgtgctgctgaccgaggcccccctgaaccccaaggccaaccgcgagaagatgacccagatcatgtttgagaccttcaacaccccagccatgtacgttgctatccaggctgtgctatccctgtacgcctctggccgtaccactggcatcgtgatggactccggtgacggggtcacccacactgtgcccatctacgaggggtatgccctcccccatgccatcctgcgtctggacctggctggccgggacctgactgactacctcatgaagatcctcaccgagcgcggctacagcttcaccaccacggccgagcgggaaatcgtgcgtgacattaaggagaagctgtgctacgtcgccctggacttcgagcaagagatggccacggctgcttccagctcctccctggagaagagctacgagctgcctgacggccaggtcatcaccattggcaatgagcggttccgctgccctgaggcactcttccagccttccttcctgggcatggagtcctgtggcatccacgaaactaccttcaactccatcatgaagtgtgacgtggacatccgcaaagacctgtacgccaacacagtgctgtctggcggcaccaccatgtaccctggcattgccgacaggatgcagaaggagatcactgccctggcacccagcacaatgaagatcaagatcattgctcctcctgagcgcaagtactccgtgtggatcggcggctccatcctggcctcgctgtccaccttccagcagatgtggatcagcaagcaggagtatgacgagtccggcccctccatcgtccaccgcaaatgcttctaggcggactatgacttagttgcgttacaccctttcttgacaaaacctaacttgcgcagaaaacaagatgagattggcatggctttatttgttttttttgttttgttttggttttttttttttttttggcttgactcaggatttaaaaactggaacggtgaaggtgacagcagtcggttggagcgagcatcccccaaagttcacaatgtggccgaggactttgattgcacattgttgtttttttaatagtcattccaaatatgagatgcgttgttacaggaagtcccttgccatcctaaaagccaccccacttctctctaaggagaatggcccagtcctctcccaagtccacacaggggaggtgatagcattgctttcgtgtaaattatgtaatgcaaaatttttttaatcttcgccttaatacttttttattttgttttattttgaatgatgagccttcgtgcccccccttcccccttttttgtcccccaacttgagatgtatgaaggcttttggtctccctgggagtgggtggaggcagccagggcttacctgtacactgacttgagaccagttgaataaaagtgcacaccttaaaaatgaaccgccgagaccgcgtccgccccgcgagcacagagcctcgcctttgccgatccgccgcccgtccacacccgccgccagctcaccatggatgatgatatcgccgcgctcgtcgtcgacaacggctccggcatgtgcaaggccggcttcgcgggcgacgatgccccccgggccgtcttcccctccatcgtggggcgccccaggcaccagggcgtgatggtgggcatgggtcagaaggattcctatgtgggcgacgaggcccagagcaagagaggcatcctcaccctgaagtaccccatcgagcacggcatcgtcaccaactgggacgacatggagaaaatctggcaccacaccttctacaatgagctgcgtgtggctcccgaggagcaccccgtgctgctgaccgaggcccccctgaaccccaaggccaaccgcgagaagatgacccagatcatgtttgagaccttcaacaccccagccatgtacgttgctatccaggctgtgctatccctgtacgcctctggccgtaccactggcatcgtgatggactccggtgacggggtcacccacactgtgcccatctacgaggggtatgccctcccccatgccatcctgcgtctggacctggctggccgggacctgactgactacctcatgaagatcctcaccgagcgcggctacagcttcaccaccacggccgagcgggaaatcgtgcgtgacattaaggagaagctgtgctacgtcgccctggacttcgagcaagagatggccacggctgcttccagctcctccctggagaagagctacgagctgcctgacggccaggtcatcaccattggcaatgagcggttccgctgccctgaggcactcttccagccttccttcctgggcatggagtcctgtggcatccacgaaactaccttcaactccatcatgaagtgtgacgtggacatccgcaaagacctgtacgccaacacagtgctgtctggcggcaccaccatgtaccctggcattgccgacaggatgcagaaggagatcactgccctggcacccagcacaatgaagatcaagatcattgctcctcctgagcgcaagtactccgtgtggatcggcggctccatcctggcctcgctgtccaccttccagcagatgtggatcagcaagcaggagtatgacgagtccggcccctccatcgtccaccgcaaatgcttctaggcggactatgacttagttgcgttacaccctttcttgacaaaacctaacttgcgcagaaaacaagatgagattggcatggctttatttgttttttttgttttgttttggttttttttttttttttggcttgactcaggatttaaaaactggaacggtgaaggtgacagcagtcggttggagcgagcatcccccaaagttcacaatgtggccgaggactttgattgcacattgttgtttttttaatagtcattccaaatatgagatgcgttgttacaggaagtcccttgccatcctaaaagccaccccacttctctctaaggagaatggcccagtcctctcccaagtccacacaggggaggtgatagcattgctttcgtgtaaattatgtaatgcaaaatttttttaatcttcgccttaatacttttttattttgttttattttgaatgatgagccttcgtgcccccccttcccccttttttgtcccccaacttgagatgtatgaaggcttttggtctccctgggagtgggtggaggcagccagggcttacctgtacactgacttgagaccagttgaataaaagtgcacaccttaaaaatgaaccgccgagaccgcgtccgccccgcgagcacagagcctcgcctttgccgatccgccgcccgtccacacccgccgccagctcaccatggatgatgatatcgccgcgctcgtcgtcgacaacggctccggcatgtgcaaggccggcttcgcgggcgacgatgccccccgggccgtcttcccctccatcgtggggcgccccaggcaccagggcgtgatggtgggcatgggtcagaaggattcctatgtgggcgacgaggcccagagcaagagaggcatcctcaccctgaagtaccccatcgagcacggcatcgtcaccaactgggacgacatggagaaaatctggcaccacaccttctacaatgagctgcgtgtggctcccgaggagcaccccgtgctgctgaccgaggcccccctgaaccccaaggccaaccgcgagaagatgacccagatcatgtttgagaccttcaacaccccagccatgtacgttgctatccaggctgtgctatccctgtacgcctctggccgtaccactggcatcgtgatggactccggtgacggggtcacccacactgtgcccatctacgaggggtatgccctcccccatgccatcctgcgtctggacctggctggccgggacctgactgactacctcatgaagatcctcaccgagcgcggctacagcttcaccaccacggccgagcgggaaatcgtgcgtgacattaaggagaagctgtgctacgtcgccctggacttcgagcaagagatggccacggctgcttccagctcctccctggagaagagctacgagctgcctgacggccaggtcatcaccattggcaatgagcggttccgctgccctgaggcactcttccagccttccttcctgggcatggagtcctgtggcatccacgaaactaccttcaactccatcatgaagtgtgacgtggacatccgcaaagacctgtacgccaacacagtgctgtctggcggcaccaccatgtaccctggcattgccgacaggatgcagaaggagatcactgccctggcacccagcacaatgaagatcaagatcattgctcctcctgagcgcaagtactccgtgtggatcggcggctccatcctggcctcgctgtccaccttccagcagatgtggatcagcaagcaggagtatgacgagtccggcccctccatcgtccaccgcaaatgcttctaggcggactatgacttagttgcgttacaccctttcttgacaaaacctaacttgcgcagaaaacaagatgagattggcatggctttatttgttttttttgttttgttttggttttttttttttttttggcttgactcaggatttaaaaactggaacggtgaaggtgacagcagtcggttggagcgagcatcccccaaagttcacaatgtggccgaggactttgattgcacattgttgtttttttaatagtcattccaaatatgagatgcgttgttacaggaagtcccttgccatcctaaaagccaccccacttctctctaaggagaatggcccagtcctctcccaagtccacacaggggaggtgatagcattgctttcgtgtaaattatgtaatgcaaaatttttttaatcttcgccttaatacttttttattttgttttattttgaatgatgagccttcgtgcccccccttcccccttttttgtcccccaacttgagatgtatgaaggcttttggtctccctgggagtgggtggaggcagccagggcttacctgtacactgacttgagaccagttgaataaaagtgcacaccttaaaaatgaaccgccgagaccgcgtccgccccgcgagcacagagcctcgcctttgccgatccgccgcccgtccacacccgccgccagctcaccatggatgatgatatcgccgcgctcgtcgtcgacaacggctccggcatgtgcaaggccggcttcgcgggcgacgatgccccccgggccgtcttcccctccatcgtggggcgccccaggcaccagggcgtgatggtgggcatgggtcagaaggattcctatgtgggcgacgaggcccagagcaagagaggcatcctcaccctgaagtaccccatcgagcacggcatcgtcaccaactgggacgacatggagaaaatctggcaccacaccttctacaatgagctgcgtgtggctcccgaggagcaccccgtgctgctgaccgaggcccccctgaaccccaaggccaaccgcgagaagatgacccagatcatgtttgagaccttcaacaccccagccatgtacgttgctatccaggctgtgctatccctgtacgcctctggccgtaccactggcatcgtgatggactccggtgacggggtcacccacactgtgcccatctacgaggggtatgccctcccccatgccatcctgcgtctggacctggctggccgggacctgactgactacctcatgaagatcctcaccgagcgcggctacagcttcaccaccacggccgagcgggaaatcgtgcgtgacattaaggagaagctgtgctacgtcgccctggacttcgagcaagagatggccacggctgcttccagctcctccctggagaagagctacgagctgcctgacggccaggtcatcaccattggcaatgagcggttccgctgccctgaggcactcttccagccttccttcctgggcatggagtcctgtggcatccacgaaactaccttcaactccatcatgaagtgtgacgtggacatccgcaaagacctgtacgccaacacagtgctgtctggcggcaccaccatgtaccctggcattgccgacaggatgcagaaggagatcactgccctggcacccagcacaatgaagatcaagatcattgctcctcctgagcgcaagtactccgtgtggatcggcggctccatcctggcctcgctgtccaccttccagcagatgtggatcagcaagcaggagtatgacgagtccggcccctccatcgtccaccgcaaatgcttctaggcggactatgacttagttgcgttacaccctttcttgacaaaacctaacttgcgcagaaaacaagatgagattggcatggctttatttgttttttttgttttgttttggttttttttttttttttggcttgactcaggatttaaaaactggaacggtgaaggtgacagcagtcggttggagcgagcatcccccaaagttcacaatgtggccgaggactttgattgcacattgttgtttttttaatagtcattccaaatatgagatgcgttgttacaggaagtcccttgccatcctaaaagccaccccacttctctctaaggagaatggcccagtcctctcccaagtccacacaggggaggtgatagcattgctttcgtgtaaattatgtaatgcaaaatttttttaatcttcgccttaatacttttttattttgttttattttgaatgatgagccttcgtgcccccccttcccccttttttgtcccccaacttgagatgtatgaaggcttttggtctccctgggagtgggtggaggcagccagggcttacctgtacactgacttgagaccagttgaataaaagtgcacaccttaaaaatgaaccgccgagaccgcgtccgccccgcgagcacagagcctcgcctttgccgatccgccgcccgtccacacccgccgccagctcaccatggatgatgatatcgccgcgctcgtcgtcgacaacggctccggcatgtgcaaggccggcttcgcgggcgacgatgccccccgggccgtcttcccctccatcgtggggcgccccaggcaccagggcgtgatggtgggcatgggtcagaaggattcctatgtgggcgacgaggcccagagcaagagaggcatcctcaccctgaagtaccccatcgagcacggcatcgtcaccaactgggacgacatggagaaaatctggcaccacaccttctacaatgagctgcgtgtggctcccgaggagcaccccgtgctgctgaccgaggcccccctgaaccccaaggccaaccgcgagaagatgacccagatcatgtttgagaccttcaacaccccagccatgtacgttgctatccaggctgtgctatccctgtacgcctctggccgtaccactggcatcgtgatggactccggtgacggggtcacccacactgtgcccatctacgaggggtatgccctcccccatgccatcctgcgtctggacctggctggccgggacctgactgactacctcatgaagatcctcaccgagcgcggctacagcttcaccaccacggccgagcgggaaatcgtgcgtgacattaaggagaagctgtgctacgtcgccctggacttcgagcaagagatggccacggctgcttccagctcctccctggagaagagctacgagctgcctgacggccaggtcatcaccattggcaatgagcggttccgctgccctgaggcactcttccagccttccttcctgggcatggagtcctgtggcatccacgaaactaccttcaactccatcatgaagtgtgacgtggacatccgcaaagacctgtacgccaacacagtgctgtctggcggcaccaccatgtaccctggcattgccgacaggatgcagaaggagatcactgccctggcacccagcacaatgaagatcaagatcattgctcctcctgagcgcaagtactccgtgtggatcggcggctccatcctggcctcgctgtccaccttccagcagatgtggatcagcaagcaggagtatgacgagtccggcccctccatcgtccaccgcaaatgcttctaggcggactatgacttagttgcgttacaccctttcttgacaaaacctaacttgcgcagaaaacaagatgagattggcatggctttatttgttttttttgttttgttttggttttttttttttttttggcttgactcaggatttaaaaactggaacggtgaaggtgacagcagtcggttggagcgagcatcccccaaagttcacaatgtggccgaggactttgattgcacattgttgtttttttaatagtcattccaaatatgagatgcgttgttacaggaagtcccttgccatcctaaaagccaccccacttctctctaaggagaatggcccagtcctctcccaagtccacacaggggaggtgatagcattgctttcgtgtaaattatgtaatgcaaaatttttttaatcttcgccttaatacttttttattttgttttattttgaatgatgagccttcgtgcccccccttcccccttttttgtcccccaacttgagatgtatgaaggcttttggtctccctgggagtgggtggaggcagccagggcttacctgtacactgacttgagaccagttgaataaaagtgcacaccttaaaaatgaaccgccgagaccgcgtccgccccgcgagcacagagcctcgcctttgccgatccgccgcccgtccacacccgccgccagctcaccatggatgatgatatcgccgcgctcgtcgtcgacaacggctccggcatgtgcaaggccggcttcgcgggcgacgatgccccccgggccgtcttcccctccatcgtggggcgccccaggcaccagggcgtgatggtgggcatgggtcagaaggattcctatgtgggcgacgaggcccagagcaagagaggcatcctcaccctgaagtaccccatcgagcacggcatcgtcaccaactgggacgacatggagaaaatctggcaccacaccttctacaatgagctgcgtgtggctcccgaggagcaccccgtgctgctgaccgaggcccccctgaaccccaaggccaaccgcgagaagatgacccagatcatgtttgagaccttcaacaccccagccatgtacgttgctatccaggctgtgctatccctgtacgcctctggccgtaccactggcatcgtgatggactccggtgacggggtcacccacactgtgcccatctacgaggggtatgccctcccccatgccatcctgcgtctggacctggctggccgggacctgactgactacctcatgaagatcctcaccgagcgcggctacagcttcaccaccacggccgagcgggaaatcgtgcgtgacattaaggagaagctgtgctacgtcgccctggacttcgagcaagagatggccacggctgcttccagctcctccctggagaagagctacgagctgcctgacggccaggtcatcaccattggcaatgagcggttccgctgccctgaggcactcttccagccttccttcctgggcatggagtcctgtggcatccacgaaactaccttcaactccatcatgaagtgtgacgtggacatccgcaaagacctgtacgccaacacagtgctgtctggcggcaccaccatgtaccctggcattgccgacaggatgcagaaggagatcactgccctggcacccagcacaatgaagatcaagatcattgctcctcctgagcgcaagtactccgtgtggatcggcggctccatcctggcctcgctgtccaccttccagcagatgtggatcagcaagcaggagtatgacgagtccggcccctccatcgtccaccgcaaatgcttctaggcggactatgacttagttgcgttacaccctttcttgacaaaacctaacttgcgcagaaaacaagatgagattggcatggctttatttgttttttttgttttgttttggttttttttttttttttggcttgactcaggatttaaaaactggaacggtgaaggtgacagcagtcggttggagcgagcatcccccaaagttcacaatgtggccgaggactttgattgcacattgttgtttttttaatagtcattccaaatatgagatgcgttgttacaggaagtcccttgccatcctaaaagccaccccacttctctctaaggagaatggcccagtcctctcccaagtccacacaggggaggtgatagcattgctttcgtgtaaattatgtaatgcaaaatttttttaatcttcgccttaatacttttttattttgttttattttgaatgatgagccttcgtgcccccccttcccccttttttgtcccccaacttgagatgtatgaaggcttttggtctccctgggagtgggtggaggcagccagggcttacctgtacactgacttgagaccagttgaataaaagtgcacaccttaaaaatgaaccgccgagaccgcgtccgccccgcgagcacagagcctcgcctttgccgatccgccgcccgtccacacccgccgccagctcaccatggatgatgatatcgccgcgctcgtcgtcgacaacggctccggcatgtgcaaggccggcttcgcgggcgacgatgccccccgggccgtcttcccctccatcgtggggcgccccaggcaccagggcgtgatggtgggcatgggtcagaaggattcctatgtgggcgacgaggcccagagcaagagaggcatcctcaccctgaagtaccccatcgagcacggcatcgtcaccaactgggacgacatggagaaaatctggcaccacaccttctacaatgagctgcgtgtggctcccgaggagcaccccgtgctgctgaccgaggcccccctgaaccccaaggccaaccgcgagaagatgacccagatcatgtttgagaccttcaacaccccagccatgtacgttgctatccaggctgtgctatccctgtacgcctctggccgtaccactggcatcgtgatggactccggtgacggggtcacccacactgtgcccatctacgaggggtatgccctcccccatgccatcctgcgtctggacctggctggccgggacctgactgactacctcatgaagatcctcaccgagcgcggctacagcttcaccaccacggccgagcgggaaatcgtgcgtgacattaaggagaagctgtgctacgtcgccctggacttcgagcaagagatggccacggctgcttccagctcctccctggagaagagctacgagctgcctgacggccaggtcatcaccattggcaatgagcggttccgctgccctgaggcactcttccagccttccttcctgggcatggagtcctgtggcatccacgaaactaccttcaactccatcatgaagtgtgacgtggacatccgcaaagacctgtacgccaacacagtgctgtctggcggcaccaccatgtaccctggcattgccgacaggatgcagaaggagatcactgccctggcacccagcacaatgaagatcaagatcattgctcctcctgagcgcaagtactccgtgtggatcggcggctccatcctggcctcgctgtccaccttccagcagatgtggatcagcaagcaggagtatgacgagtccggcccctccatcgtccaccgcaaatgcttctaggcggactatgacttagttgcgttacaccctttcttgacaaaacctaacttgcgcagaaaacaagatgagattggcatggctttatttgttttttttgttttgttttggttttttttttttttttggcttgactcaggatttaaaaactggaacggtgaaggtgacagcagtcggttggagcgagcatcccccaaagttcacaatgtggccgaggactttgattgcacattgttgtttttttaatagtcattccaaatatgagatgcgttgttacaggaagtcccttgccatcctaaaagccaccccacttctctctaaggagaatggcccagtcctctcccaagtccacacaggggaggtgatagcattgctttcgtgtaaattatgtaatgcaaaatttttttaatcttcgccttaatacttttttattttgttttattttgaatgatgagccttcgtgcccccccttcccccttttttgtcccccaacttgagatgtatgaaggcttttggtctccctgggagtgggtggaggcagccagggcttacctgtacactgacttgagaccagttgaataaaagtgcacaccttaaaaatgaaccgccgagaccgcgtccgccccgcgagcacagagcctcgcctttgccgatccgccgcccgtccacacccgccgccagctcaccatggatgatgatatcgccgcgctcgtcgtcgacaacggctccggcatgtgcaaggccggcttcgcgggcgacgatgccccccgggccgtcttcccctccatcgtggggcgccccaggcaccagggcgtgatggtgggcatgggtcagaaggattcctatgtgggcgacgaggcccagagcaagagaggcatcctcaccctgaagtaccccatcgagcacggcatcgtcaccaactgggacgacatggagaaaatctggcaccacaccttctacaatgagctgcgtgtggctcccgaggagcaccccgtgctgctgaccgaggcccccctgaaccccaaggccaaccgcgagaagatgacccagatcatgtttgagaccttcaacaccccagccatgtacgttgctatccaggctgtgctatccctgtacgcctctggccgtaccactggcatcgtgatggactccggtgacggggtcacccacactgtgcccatctacgaggggtatgccctcccccatgccatcctgcgtctggacctggctggccgggacctgactgactacctcatgaagatcctcaccgagcgcggctacagcttcaccaccacggccgagcgggaaatcgtgcgtgacattaaggagaagctgtgctacgtcgccctggacttcgagcaagagatggccacggctgcttccagctcctccctggagaagagctacgagctgcctgacggccaggtcatcaccattggcaatgagcggttccgctgccctgaggcactcttccagccttccttcctgggcatggagtcctgtggcatccacgaaactaccttcaactccatcatgaagtgtgacgtggacatccgcaaagacctgtacgccaacacagtgctgtctggcggcaccaccatgtaccctggcattgccgacaggatgcagaaggagatcactgccctggcacccagcacaatgaagatcaagatcattgctcctcctgagcgcaagtactccgtgtggatcggcggctccatcctggcctcgctgtccaccttccagcagatgtggatcagcaagcaggagtatgacgagtccggcccctccatcgtccaccgcaaatgcttctaggcggactatgacttagttgcgttacaccctttcttgacaaaacctaacttgcgcagaaaacaagatgagattggcatggctttatttgttttttttgttttgttttggttttttttttttttttggcttgactcaggatttaaaaactggaacggtgaaggtgacagcagtcggttggagcgagcatcccccaaagttcacaatgtggccgaggactttgattgcacattgttgtttttttaatagtcattccaaatatgagatgcgttgttacaggaagtcccttgccatcctaaaagccaccccacttctctctaaggagaatggcccagtcctctcccaagtccacacaggggaggtgatagcattgctttcgtgtaaattatgtaatgcaaaatttttttaatcttcgccttaatacttttttattttgttttattttgaatgatgagccttcgtgcccccccttcccccttttttgtcccccaacttgagatgtatgaaggcttttggtctccctgggagtgggtggaggcagccagggcttacctgtacactgacttgagaccagttgaataaaagtgcacaccttaaaaatgaaccgccgagaccgcgtccgccccgcgagcacagagcctcgcctttgccgatccgccgcccgtccacacccgccgccagctcaccatggatgatgatatcgccgcgctcgtcgtcgacaacggctccggcatgtgcaaggccggcttcgcgggcgacgatgccccccgggccgtcttcccctccatcgtggggcgccccaggcaccagggcgtgatggtgggcatgggtcagaaggattcctatgtgggcgacgaggcccagagcaagagaggcatcctcaccctgaagtaccccatcgagcacggcatcgtcaccaactgggacgacatggagaaaatctggcaccacaccttctacaatgagctgcgtgtggctcccgaggagcaccccgtgctgctgaccgaggcccccctgaaccccaaggccaaccgcgagaagatgacccagatcatgtttgagaccttcaacaccccagccatgtacgttgctatccaggctgtgctatccctgtacgcctctggccgtaccactggcatcgtgatggactccggtgacggggtcacccacactgtgcccatctacgaggggtatgccctcccccatgccatcctgcgtctggacctggctggccgggacctgactgactacctcatgaagatcctcaccgagcgcggctacagcttcaccaccacggccgagcgggaaatcgtgcgtgacattaaggagaagctgtgctacgtcgccctggacttcgagcaagagatggccacggctgcttccagctcctccctggagaagagctacgagctgcctgacggccaggtcatcaccattggcaatgagcggttccgctgccctgaggcactcttccagccttccttcctgggcatggagtcctgtggcatccacgaaactaccttcaactccatcatgaagtgtgacgtggacatccgcaaagacctgtacgccaacacagtgctgtctggcggcaccaccatgtaccctggcattgccgacaggatgcagaaggagatcactgccctggcacccagcacaatgaagatcaagatcattgctcctcctgagcgcaagtactccgtgtggatcggcggctccatcctggcctcgctgtccaccttccagcagatgtggatcagcaagcaggagtatgacgagtccggcccctccatcgtccaccgcaaatgcttctaggcggactatgacttagttgcgttacaccctttcttgacaaaacctaacttgcgcagaaaacaagatgagattggcatggctttatttgttttttttgttttgttttggttttttttttttttttggcttgactcaggatttaaaaactggaacggtgaaggtgacagcagtcggttggagcgagcatcccccaaagttcacaatgtggccgaggactttgattgcacattgttgtttttttaatagtcattccaaatatgagatgcgttgttacaggaagtcccttgccatcctaaaagccaccccacttctctctaaggagaatggcccagtcctctcccaagtccacacaggggaggtgatagcattgctttcgtgtaaattatgtaatgcaaaatttttttaatcttcgccttaatacttttttattttgttttattttgaatgatgagccttcgtgcccccccttcccccttttttgtcccccaacttgagatgtatgaaggcttttggtctccctgggagtgggtggaggcagccagggcttacctgtacactgacttgagaccagttgaataaaagtgcacaccttaaaaatgaaccgccgagaccgcgtccgccccgcgagcacagagcctcgcctttgccgatccgccgcccgtccacacccgccgccagctcaccatggatgatgatatcgccgcgctcgtcgtcgacaacggctccggcatgtgcaaggccggcttcgcgggcgacgatgccccccgggccgtcttcccctccatcgtggggcgccccaggcaccagggcgtgatggtgggcatgggtcagaaggattcctatgtgggcgacgaggcccagagcaagagaggcatcctcaccctgaagtaccccatcgagcacggcatcgtcaccaactgggacgacatggagaaaatctggcaccacaccttctacaatgagctgcgtgtggctcccgaggagcaccccgtgctgctgaccgaggcccccctgaaccccaaggccaaccgcgagaagatgacccagatcatgtttgagaccttcaacaccccagccatgtacgttgctatccaggctgtgctatccctgtacgcctctggccgtaccactggcatcgtgatggactccggtgacggggtcacccacactgtgcccatctacgaggggtatgccctcccccatgccatcctgcgtctggacctggctggccgggacctgactgactacctcatgaagatcctcaccgagcgcggctacagcttcaccaccacggccgagcgggaaatcgtgcgtgacattaaggagaagctgtgctacgtcgccctggacttcgagcaagagatggccacggctgcttccagctcctccctggagaagagctacgagctgcctgacggccaggtcatcaccattggcaatgagcggttccgctgccctgaggcactcttccagccttccttcctgggcatggagtcctgtggcatccacgaaactaccttcaactccatcatgaagtgtgacgtggacatccgcaaagacctgtacgccaacacagtgctgtctggcggcaccaccatgtaccctggcattgccgacaggatgcagaaggagatcactgccctggcacccagcacaatgaagatcaagatcattgctcctcctgagcgcaagtactccgtgtggatcggcggctccatcctggcctcgctgtccaccttccagcagatgtggatcagcaagcaggagtatgacgagtccggcccctccatcgtccaccgcaaatgcttctaggcggactatgacttagttgcgttacaccctttcttgacaaaacctaacttgcgcagaaaacaagatgagattggcatggctttatttgttttttttgttttgttttggttttttttttttttttggcttgactcaggatttaaaaactggaacggtgaaggtgacagcagtcggttggagcgagcatcccccaaagttcacaatgtggccgaggactttgattgcacattgttgtttttttaatagtcattccaaatatgagatgcgttgttacaggaagtcccttgccatcctaaaagccaccccacttctctctaaggagaatggcccagtcctctcccaagtccacacaggggaggtgatagcattgctttcgtgtaaattatgtaatgcaaaatttttttaatcttcgccttaatacttttttattttgttttattttgaatgatgagccttcgtgcccccccttcccccttttttgtcccccaacttgagatgtatgaaggcttttggtctccctgggagtgggtggaggcagccagggcttacctgtacactgacttgagaccagttgaataaaagtgcacaccttaaaaatgaaccgccgagaccgcgtccgccccgcgagcacagagcctcgcctttgccgatccgccgcccgtccacacccgccgccagctcaccatggatgatgatatcgccgcgctcgtcgtcgacaacggctccggcatgtgcaaggccggcttcgcgggcgacgatgccccccgggccgtcttcccctccatcgtggggcgccccaggcaccagggcgtgatggtgggcatgggtcagaaggattcctatgtgggcgacgaggcccagagcaagagaggcatcctcaccctgaagtaccccatcgagcacggcatcgtcaccaactgggacgacatggagaaaatctggcaccacaccttctacaatgagctgcgtgtggctcccgaggagcaccccgtgctgctgaccgaggcccccctgaaccccaaggccaaccgcgagaagatgacccagatcatgtttgagaccttcaacaccccagccatgtacgttgctatccaggctgtgctatccctgtacgcctctggccgtaccactggcatcgtgatggactccggtgacggggtcacccacactgtgcccatctacgaggggtatgccctcccccatgccatcctgcgtctggacctggctggccgggacctgactgactacctcatgaagatcctcaccgagcgcggctacagcttcaccaccacggccgagcgggaaatcgtgcgtgacattaaggagaagctgtgctacgtcgccctggacttcgagcaagagatggccacggctgcttccagctcctccctggagaagagctacgagctgcctgacggccaggtcatcaccattggcaatgagcggttccgctgccctgaggcactcttccagccttccttcctgggcatggagtcctgtggcatccacgaaactaccttcaactccatcatgaagtgtgacgtggacatccgcaaagacctgtacgccaacacagtgctgtctggcggcaccaccatgtaccctggcattgccgacaggatgcagaaggagatcactgccctggcacccagcacaatgaagatcaagatcattgctcctcctgagcgcaagtactccgtgtggatcggcggctccatcctggcctcgctgtccaccttccagcagatgtggatcagcaagcaggagtatgacgagtccggcccctccatcgtccaccgcaaatgcttctaggcggactatgacttagttgcgttacaccctttcttgacaaaacctaacttgcgcagaaaacaagatgagattggcatggctttatttgttttttttgttttgttttggttttttttttttttttggcttgactcaggatttaaaaactggaacggtgaaggtgacagcagtcggttggagcgagcatcccccaaagttcacaatgtggccgaggactttgattgcacattgttgtttttttaatagtcattccaaatatgagatgcgttgttacaggaagtcccttgccatcctaaaagccaccccacttctctctaaggagaatggcccagtcctctcccaagtccacacaggggaggtgatagcattgctttcgtgtaaattatgtaatgcaaaatttttttaatcttcgccttaatacttttttattttgttttattttgaatgatgagccttcgtgcccccccttcccccttttttgtcccccaacttgagatgtatgaaggcttttggtctccctgggagtgggtggaggcagccagggcttacctgtacactgacttgagaccagttgaataaaagtgcacaccttaaaaatgaaccgccgagaccgcgtccgccccgcgagcacagagcctcgcctttgccgatccgccgcccgtccacacccgccgccagctcaccatggatgatgatatcgccgcgctcgtcgtcgacaacggctccggcatgtgcaaggccggcttcgcgggcgacgatgccccccgggccgtcttcccctccatcgtggggcgccccaggcaccagggcgtgatggtgggcatgggtcagaaggattcctatgtgggcgacgaggcccagagcaagagaggcatcctcaccctgaagtaccccatcgagcacggcatcgtcaccaactgggacgacatggagaaaatctggcaccacaccttctacaatgagctgcgtgtggctcccgaggagcaccccgtgctgctgaccgaggcccccctgaaccccaaggccaaccgcgagaagatgacccagatcatgtttgagaccttcaacaccccagccatgtacgttgctatccaggctgtgctatccctgtacgcctctggccgtaccactggcatcgtgatggactccggtgacggggtcacccacactgtgcccatctacgaggggtatgccctcccccatgccatcctgcgtctggacctggctggccgggacctgactgactacctcatgaagatcctcaccgagcgcggctacagcttcaccaccacggccgagcgggaaatcgtgcgtgacattaaggagaagctgtgctacgtcgccctggacttcgagcaagagatggccacggctgcttccagctcctccctggagaagagctacgagctgcctgacggccaggtcatcaccattggcaatgagcggttccgctgccctgaggcactcttccagccttccttcctgggcatggagtcctgtggcatccacgaaactaccttcaactccatcatgaagtgtgacgtggacatccgcaaagacctgtacgccaacacagtgctgtctggcggcaccaccatgtaccctggcattgccgacaggatgcagaaggagatcactgccctggcacccagcacaatgaagatcaagatcattgctcctcctgagcgcaagtactccgtgtggatcggcggctccatcctggcctcgctgtccaccttccagcagatgtggatcagcaagcaggagtatgacgagtccggcccctccatcgtccaccgcaaatgcttctaggcggactatgacttagttgcgttacaccctttcttgacaaaacctaacttgcgcagaaaacaagatgagattggcatggctttatttgttttttttgttttgttttggttttttttttttttttggcttgactcaggatttaaaaactggaacggtgaaggtgacagcagtcggttggagcgagcatcccccaaagttcacaatgtggccgaggactttgattgcacattgttgtttttttaatagtcattccaaatatgagatgcgttgttacaggaagtcccttgccatcctaaaagccaccccacttctctctaaggagaatggcccagtcctctcccaagtccacacaggggaggtgatagcattgctttcgtgtaaattatgtaatgcaaaatttttttaatcttcgccttaatacttttttattttgttttattttgaatgatgagccttcgtgcccccccttcccccttttttgtcccccaacttgagatgtatgaaggcttttggtctccctgggagtgggtggaggcagccagggcttacctgtacactgacttgagaccagttgaataaaagtgcacaccttaaaaatgaaccgccgagaccgcgtccgccccgcgagcacagagcctcgcctttgccgatccgccgcccgtccacacccgccgccagctcaccatggatgatgatatcgccgcgctcgtcgtcgacaacggctccggcatgtgcaaggccggcttcgcgggcgacgatgccccccgggccgtcttcccctccatcgtggggcgccccaggcaccagggcgtgatggtgggcatgggtcagaaggattcctatgtgggcgacgaggcccagagcaagagaggcatcctcaccctgaagtaccccatcgagcacggcatcgtcaccaactgggacgacatggagaaaatctggcaccacaccttctacaatgagctgcgtgtggctcccgaggagcaccccgtgctgctgaccgaggcccccctgaaccccaaggccaaccgcgagaagatgacccagatcatgtttgagaccttcaacaccccagccatgtacgttgctatccaggctgtgctatccctgtacgcctctggccgtaccactggcatcgtgatggactccggtgacggggtcacccacactgtgcccatctacgaggggtatgccctcccccatgccatcctgcgtctggacctggctggccgggacctgactgactacctcatgaagatcctcaccgagcgcggctacagcttcaccaccacggccgagcgggaaatcgtgcgtgacattaaggagaagctgtgctacgtcgccctggacttcgagcaagagatggccacggctgcttccagctcctccctggagaagagctacgagctgcctgacggccaggtcatcaccattggcaatgagcggttccgctgccctgaggcactcttccagccttccttcctgggcatggagtcctgtggcatccacgaaactaccttcaactccatcatgaagtgtgacgtggacatccgcaaagacctgtacgccaacacagtgctgtctggcggcaccaccatgtaccctggcattgccgacaggatgcagaaggagatcactgccctggcacccagcacaatgaagatcaagatcattgctcctcctgagcgcaagtactccgtgtggatcggcggctccatcctggcctcgctgtccaccttccagcagatgtggatcagcaagcaggagtatgacgagtccggcccctccatcgtccaccgcaaatgcttctaggcggactatgacttagttgcgttacaccctttcttgacaaaacctaacttgcgcagaaaacaagatgagattggcatggctttatttgttttttttgttttgttttggttttttttttttttttggcttgactcaggatttaaaaactggaacggtgaaggtgacagcagtcggttggagcgagcatcccccaaagttcacaatgtggccgaggactttgattgcacattgttgtttttttaatagtcattccaaatatgagatgcgttgttacaggaagtcccttgccatcctaaaagccaccccacttctctctaaggagaatggcccagtcctctcccaagtccacacaggggaggtgatagcattgctttcgtgtaaattatgtaatgcaaaatttttttaatcttcgccttaatacttttttattttgttttattttgaatgatgagccttcgtgcccccccttcccccttttttgtcccccaacttgagatgtatgaaggcttttggtctccctgggagtgggtggaggcagccagggcttacctgtacactgacttgagaccagttgaataaaagtgcacaccttaaaaatgaaccgccgagaccgcgtccgccccgcgagcacagagcctcgcctttgccgatccgccgcccgtccacacccgccgccagctcaccatggatgatgatatcgccgcgctcgtcgtcgacaacggctccggcatgtgcaaggccggcttcgcgggcgacgatgccccccgggccgtcttcccctccatcgtggggcgccccaggcaccagggcgtgatggtgggcatgggtcagaaggattcctatgtgggcgacgaggcccagagcaagagaggcatcctcaccctgaagtaccccatcgagcacggcatcgtcaccaactgggacgacatggagaaaatctggcaccacaccttctacaatgagctgcgtgtggctcccgaggagcaccccgtgctgctgaccgaggcccccctgaaccccaaggccaaccgcgagaagatgacccagatcatgtttgagaccttcaacaccccagccatgtacgttgctatccaggctgtgctatccctgtacgcctctggccgtaccactggcatcgtgatggactccggtgacggggtcacccacactgtgcccatctacgaggggtatgccctcccccatgccatcctgcgtctggacctggctggccgggacctgactgactacctcatgaagatcctcaccgagcgcggctacagcttcaccaccacggccgagcgggaaatcgtgcgtgacattaaggagaagctgtgctacgtcgccctggacttcgagcaagagatggccacggctgcttccagctcctccctggagaagagctacgagctgcctgacggccaggtcatcaccattggcaatgagcggttccgctgccctgaggcactcttccagccttccttcctgggcatggagtcctgtggcatccacgaaactaccttcaactccatcatgaagtgtgacgtggacatccgcaaagacctgtacgccaacacagtgctgtctggcggcaccaccatgtaccctggcattgccgacaggatgcagaaggagatcactgccctggcacccagcacaatgaagatcaagatcattgctcctcctgagcgcaagtactccgtgtggatcggcggctccatcctggcctcgctgtccaccttccagcagatgtggatcagcaagcaggagtatgacgagtccggcccctccatcgtccaccgcaaatgcttctaggcggactatgacttagttgcgttacaccctttcttgacaaaacctaacttgcgcagaaaacaagatgagattggcatggctttatttgttttttttgttttgttttggttttttttttttttttggcttgactcaggatttaaaaactggaacggtgaaggtgacagcagtcggttggagcgagcatcccccaaagttcacaatgtggccgaggactttgattgcacattgttgtttttttaatagtcattccaaatatgagatgcgttgttacaggaagtcccttgccatcctaaaagccaccccacttctctctaaggagaatggcccagtcctctcccaagtccacacaggggaggtgatagcattgctttcgtgtaaattatgtaatgcaaaatttttttaatcttcgccttaatacttttttattttgttttattttgaatgatgagccttcgtgcccccccttcccccttttttgtcccccaacttgagatgtatgaaggcttttggtctccctgggagtgggtggaggcagccagggcttacctgtacactgacttgagaccagttgaataaaagtgcacaccttaaaaatgaaccgccgagaccgcgtccgccccgcgagcacagagcctcgcctttgccgatccgccgcccgtccacacccgccgccagctcaccatggatgatgatatcgccgcgctcgtcgtcgacaacggctccggcatgtgcaaggccggcttcgcgggcgacgatgccccccgggccgtcttcccctccatcgtggggcgccccaggcaccagggcgtgatggtgggcatgggtcagaaggattcctatgtgggcgacgaggcccagagcaagagaggcatcctcaccctgaagtaccccatcgagcacggcatcgtcaccaactgggacgacatggagaaaatctggcaccacaccttctacaatgagctgcgtgtggctcccgaggagcaccccgtgctgctgaccgaggcccccctgaaccccaaggccaaccgcgagaagatgacccagatcatgtttgagaccttcaacaccccagccatgtacgttgctatccaggctgtgctatccctgtacgcctctggccgtaccactggcatcgtgatggactccggtgacggggtcacccacactgtgcccatctacgaggggtatgccctcccccatgccatcctgcgtctggacctggctggccgggacctgactgactacctcatgaagatcctcaccgagcgcggctacagcttcaccaccacggccgagcgggaaatcgtgcgtgacattaaggagaagctgtgctacgtcgccctggacttcgagcaagagatggccacggctgcttccagctcctccctggagaagagctacgagctgcctgacggccaggtcatcaccattggcaatgagcggttccgctgccctgaggcactcttccagccttccttcctgggcatggagtcctgtggcatccacgaaactaccttcaactccatcatgaagtgtgacgtggacatccgcaaagacctgtacgccaacacagtgctgtctggcggcaccaccatgtaccctggcattgccgacaggatgcagaaggagatcactgccctggcacccagcacaatgaagatcaagatcattgctcctcctgagcgcaagtactccgtgtggatcggcggctccatcctggcctcgctgtccaccttccagcagatgtggatcagcaagcaggagtatgacgagtccggcccctccatcgtccaccgcaaatgcttctaggcggactatgacttagttgcgttacaccctttcttgacaaaacctaacttgcgcagaaaacaagatgagattggcatggctttatttgttttttttgttttgttttggttttttttttttttttggcttgactcaggatttaaaaactggaacggtgaaggtgacagcagtcggttggagcgagcatcccccaaagttcacaatgtggccgaggactttgattgcacattgttgtttttttaatagtcattccaaatatgagatgcgttgttacaggaagtcccttgccatcctaaaagccaccccacttctctctaaggagaatggcccagtcctctcccaagtccacacaggggaggtgatagcattgctttcgtgtaaattatgtaatgcaaaatttttttaatcttcgccttaatacttttttattttgttttattttgaatgatgagccttcgtgcccccccttcccccttttttgtcccccaacttgagatgtatgaaggcttttggtctccctgggagtgggtggaggcagccagggcttacctgtacactgacttgagaccagttgaataaaagtgcacaccttaaaaatgaaccgccgagaccgcgtccgccccgcgagcacagagcctcgcctttgccgatccgccgcccgtccacacccgccgccagctcaccatggatgatgatatcgccgcgctcgtcgtcgacaacggctccggcatgtgcaaggccggcttcgcgggcgacgatgccccccgggccgtcttcccctccatcgtggggcgccccaggcaccagggcgtgatggtgggcatgggtcagaaggattcctatgtgggcgacgaggcccagagcaagagaggcatcctcaccctgaagtaccccatcgagcacggcatcgtcaccaactgggacgacatggagaaaatctggcaccacaccttctacaatgagctgcgtgtggctcccgaggagcaccccgtgctgctgaccgaggcccccctgaaccccaaggccaaccgcgagaagatgacccagatcatgtttgagaccttcaacaccccagccatgtacgttgctatccaggctgtgctatccctgtacgcctctggccgtaccactggcatcgtgatggactccggtgacggggtcacccacactgtgcccatctacgaggggtatgccctcccccatgccatcctgcgtctggacctggctggccgggacctgactgactacctcatgaagatcctcaccgagcgcggctacagcttcaccaccacggccgagcgggaaatcgtgcgtgacattaaggagaagctgtgctacgtcgccctggacttcgagcaagagatggccacggctgcttccagctcctc

SEQ ID NO: 899 - DNA, 5285 bp, Homo sapiens
  misc_feature (813)..(813): second gene starts at position 813
atgggggacgtgctgtccacgcacctggacgacgcccggcgccagcacatcgcagaaaaaaccgggaagatcctgacggagttcctccagttctatgaagaccagtatggcgtggctctcttcaacagcatgcgccatgagattgagggcacggggctgccgcaggcccagctgctctggcgcaaggtgccactggacgagcgcatcgtcttctcggggaacctcttccagcaccaggaggacagcaagaagtggagaaaccgcttcagcctcgtgccccacaactacgggctggtgctctacgaaaacaaagcggcctatgagcggcaggtcccaccacgagccgtcatcaacagtgcaggctacaaaatcctcacgtccgtggaccaatacctggagctcattggcaactccttaccagggaccacggcaaagtcgggcagtgcccccatcctcaagtgccccacacagttcccgctcatcctctggcatccttatgcgcgtcactactacttctgcatgatgacagaagccgagcaggacaagtggcaggctgtgctgcaggactgcatccggcactgcaacaatggaatccctgaggactccaaggtagagggccctgcgttcacagatgccatccgcatgtaccgacagtccaaggagctgtacggcacctgggagatgctgtgtgggaacgaggtgcagatcctgagcaacctggtgatggaggagctgggccctgagctgaaggcagagctcggcccgcggctgaaggggaaaccgcaggagcggcagcggcagtggatccagatctcggacgccgtgtaccacatggtgtacgagcaggccaaggcgcgcttcgaggaggtgctgtccaaggtgcagcaggtgcagccggccatgcaggccgtcatccgaactgacatggaccaaattatcacctccaaggagcaccttgccagcaagatccgagccttcatcctccccaaggcagaggtgtgcgtgcggaaccatgtccagccctacatcccatccatcctggaggccctgatggtccccaccagccagggcttcactgaggtgcgagatgtcttcttcaaggaggtcacggacatgaacctgaacgtcatcaacgagggcggcattgacaagctgggcgagtacatggagaagctgtcccggctggcgtaccaccccctgaagatgcagagctgctatgagaagatggagtcgctgcgactggacgggctgcagcagcgatttgatgtgtccagcacgtccgtgttcaagcagcgagcccagatccacatgcgggagcaaatggacaatgccgtgtatacgttcgagaccctcctgcaccaggagctggggaaggggcccaccaaggaggagctgtgcaagtccatccagcgggtcctggagcgggtgctgaagaaatacgactacgacagcagctctgtgcggaagaggttcttccgggaggcgctgctgcagatcagcatcccgttcctgctcaagaagctggcccctacctgcaagtcggagctgccccggttccaggagctgatcttcgaggactttgccaggttcatcctggtggaaaacacgtacgaggaggtggtgctgcagaccgtcatgaaggacatcctgcaggctgtgaaggaggccgcggtgcagaggaagcacaacctctaccgggacagcatggtcatgcacaacagcgaccccaacctgcacctgctggccgagggcgcccccatcgactggggcgaggagtacagcaacagcggcgggggcggcagccccagccccgttcttgtcggaggagaccccctactcatacccaactggaaaccacacataccaggagattgccgtgccaccccccgtccccccacccccgtccagcgaggccctcaatggcacaatccttgaccccttagaccagtggcagcccagcagctcccgattcatccaccagcagcctcagtcctcatcacctgtgtacggctccagtgccaaaacttccagtgtctccaaccctcaggacagtgttggctctccgtgctcccgagtgggtgaggaggagcacgtctacagcttccccaacaagcagaaatcagctgagccttcacccaccgtaatgagcacgtccctgggcagcaacctttctgaactcgaccgcctgctgctggaactgaacgctgtacagcataacccgccaggcttccctgcagatgaggccaactcaagccccccgcttcctggggccctgagccccctctatggtgtcccagagactaacagccccttgggaggcaaagctgggcccctgacgaaagagaagcctaagcggaatgggggccggggcctggaggacgtgcggcccagtgtggagagtctcttggatgaactggagagctccgtgcccagccccgtccctgccatcactgtgaaccagggcgagatgagcagcccgcagcgcgtcacctccacccaacagcagacacgcatctcggcctcctctgccaccagggagctggacgagctgatggcttcgctgtcggatttcaagttcatggcccaggggaagacagggagcagctcaccccctggggggcccccgaagcccgggagccagctggacagcatgctggggagcctgcagtctgacctgaacaagctgggggtcgccacagtcgccaaaggagtctgcggggcctgcaagaagcccatcgccgggcaggttgtgaccgccatggggaagacgtggcaccccgagcacttcgtctgcacccactgccaggaggagatcggatcccggaacttcttcgagcgggatggacagccctactgtgaaaaggactaccacaacctcttctccccgcgctgctactactgcaacggccccatcctggataaagtggtgacagcccttgaccggacgtggcaccctgaacacttcttctgtgcacagtgtggagccttctttggtcccgaagggttccacgagaaggacggcaaggcctactgtcgcaaggactacttcgacatgttcgcacccaagtgtggcggctgcgcccgggccatcctggagaactatatctcagccctcaacacgctgtggcatcctgagtgctttgtgtgccgggaatgcttcacgccattcgtgaacggcagcttcttcgagcacgacgggcagccctactgtgaggtgcactaccacgagcggcgcggctcgctgtgttctggctgccagaagcccatcaccggccgctgcatcaccgccatggccaagaagttccaccccgagcacttcgtctgtgccttctgcctcaagcagctcaacaagggcaccttcaaggagcagaacgacaagccttactgtcagaactgcttcctcaagctcttctgctaggtgccctgcccctgtctctgccccccttccccagccagcatccccaactgcgactgtgacctagagacttcacccgggggtgaaggggtaaacccgactgaaactggaacccttgtcctccgctggtgcgggatggacagagggccgtgaggggtccccctgcttgtcttcacccctgccagagcctctgggccccctcctccctcctgtagctctccctaggctgcccactctccatcctccccaggggtagaggctgggggctccaccccagcccatgtacgtccccacgaactggcctggccagcaccccacactggagccatctcttcctcatatttcagcagtgcagccggggggcagggaagggcaggcagggtctgttggggtctctttttatccttattcctcccccgacctaattgtctttgttctgtgattattgggggacacccggctccctccagacaatgccagcataaatccatccatccaaaggcagagaaccaaaggggccatggaaggttctctgtgctcctcctacccttccagtgccctaggcctggcgactgcccctgccttttagacccgccctccccttttatacctgctcttgttctactgagaaaagcctctccagcaataatgttttctagtcacttcctccgtctccgggacggcgtgcctggacactgtaccgactttgatagatttctacactgaggtttgaattcatatcgcctgagttgcttttacttctctatacaaaatgattttgaagagattttaaagacgttcccttttgtattctcttcctcatccaccgccactgggcctgtcactgatggtggctctggtgtgaagtttgctttgtactgagggttggggtggggaagcaatttgtattttattgtttcttagcacaagcaggtgaactgggagcagctctgtgactccccctctttcacttcatagctcaccaggactgttttataaactgctgtatttggaaaccccttctttacttcccaggccagcaagctcttcactgaaactggttgaagggtgttgcacccttttgggcctagaattctgaactttatctgttctgtttctgtgggaggagaaggggaagtatgttttggggggctgcttcctgtctgagtaagccctcaggagcctctgctcccctgtgaacccactgaaccttctgagcccccactgcttctatggggctctctcttctgccttctcaggaaagctggtgtctgattttggccatcaggactctgacgtctctttggtcttgttgatttcctctgggcatatcccttccccagatctgctcctcccctttcacaggtgggatcggcactcagggggtctggaaagaaggtcataagggagcatgataggatttggggcagagggacaggctcctctggggaaaccccccagagctctttaccaaggatgaaagaggagccaggccttgggctcctgatgaggagaaaggggccccaccggggtctaatggtgacagtccaaaccactccactggcctcctggcagaagccgagtgtgctggggtctccgaagagggtccctcctttttgggggaaggtcagcccagcccctccaaaggtctgatgtctccactttcacccgcaggccttaccgctctgtttatagtgacccaccctagatcttccccaagagggactggggtttctggggtccattctctgagtcagtggttatttgaaaatttgattttgattttattttttctctgtaaacttccaagctggcttttcccatttcaattcctgtgatttatgccaataaagtttgcccatgattttca

SEQ ID NO: 900 - DNA, 5195 bp, Homo sapiens
  misc_feature (813)..(813): second gens starts at position 813
atgggggacgtgctgtccacgcacctggacgacgcccggcgccagcacatcgcagaaaaaaccgggaagatcctgacggagttcctccagttctatgaagaccagtatggcgtggctctcttcaacagcatgcgccatgagattgagggcacggggctgccgcaggcccagctgctctggcgcaaggtgccactggacgagcgcatcgtcttctcggggaacctcttccagcaccaggaggacagcaagaagtggagaaaccgcttcagcctcgtgccccacaactacgggctggtgctctacgaaaacaaagcggcctatgagcggcaggtcccaccacgagccgtcatcaacagtgcaggctacaaaatcctcacgtccgtggaccaatacctggagctcattggcaactccttaccagggaccacggcaaagtcgggcagtgcccccatcctcaagtgccccacacagttcccgctcatcctctggcatccttatgcgcgtcactactacttctgcatgatgacagaagccgagcaggacaagtggcaggctgtgctgcaggactgcatccggcactgcaacaatggaatccctgaggactccaaggtagagggccctgcgttcacagatgccatccgcatgtaccgacagtccaaggagctgtacggcacctgggagatgctgtgtgggaacgaggtgcagatcctgagcaacctggtgatggaggagctgggccctgagctgaaggcagagctcggcccgcggctgaaggggaaaccgcaggagcggcagcggcagtggatccagatctcggacgccgtgtaccacatggtgtacgagcaggccaaggcgcgcttcgaggaggtgctgtccaaggtgcagcaggtgcagccggccatgcaggccgtcatccgaactgacatggaccaaattatcacctccaaggagcaccttgccagcaagatccgagccttcatcctccccaaggcagaggtgtgcgtgcggaaccatgtccagccctacatcccatccatcctggaggccctgatggtccccaccagccagggcttcactgaggtgcgagatgtcttcttcaaggaggtcacggacatgaacctgaacgtcatcaacgagggcggcattgacaagctgggcgagtacatggagaagctgtcccggctggcgtaccaccccctgaagatgcagagctgctatgagaagatggagtcgctgcgactggacgggctgcagcagcgatttgatgtgtccagcacgtccgtgttcaagcagcgagcccagatccacatgcgggagcaaatggacaatgccgtgtatacgttcgagaccctcctgcaccaggagctggggaaggggcccaccaaggaggagctgtgcaagtccatccagcgggtcctggagcgggtgctgaagaaatacgactacgacagcagctctgtgcggaagaggttcttccgggaggcgctgctgcagatcagcatcccgttcctgctcaagaagctggcccctacctgcaagtcggagctgccccggttccaggagctgatcttcgaggactttgccaggttcatcctggtggaaaacacgtacgaggaggtggtgctgcagaccgtcatgaaggacatcctgcaggctgtgaaggaggccgcggtgcagaggaagcacaacctctaccgggacagcatggtcatgcacaacagcgaccccaacctgcacctgctggccgagggcgcccccatcgactggggcgaggagtacagcaacagcggcgggggcggcagccccagccccgtccagcgaggccctcaatggcacaatccttgaccccttagaccagtggcagcccagcagctcccgattcatccaccagcagcctcagtcctcatcacctgtgtacggctccagtgccaaaacttccagtgtctccaaccctcaggacagtgttggctctccgtgctcccgagtgggtgaggaggagcacgtctacagcttccccaacaagcagaaatcagctgagccttcacccaccgtaatgagcacgtccctgggcagcaacctttctgaactcgaccgcctgctgctggaactgaacgctgtacagcataacccgccaggcttccctgcagatgaggccaactcaagccccccgcttcctggggccctgagccccctctatggtgtcccagagactaacagccccttgggaggcaaagctgggcccctgacgaaagagaagcctaagcggaatgggggccggggcctggaggacgtgcggcccagtgtggagagtctcttggatgaactggagagctccgtgcccagccccgtccctgccatcactgtgaaccagggcgagatgagcagcccgcagcgcgtcacctccacccaacagcagacacgcatctcggcctcctctgccaccagggagctggacgagctgatggcttcgctgtcggatttcaagttcatggcccaggggaagacagggagcagctcaccccctggggggcccccgaagcccgggagccagctggacagcatgctggggagcctgcagtctgacctgaacaagctgggggtcgccacagtcgccaaaggagtctgcggggcctgcaagaagcccatcgccgggcaggttgtgaccgccatggggaagacgtggcaccccgagcacttcgtctgcacccactgccaggaggagatcggatcccggaacttcttcgagcgggatggacagccctactgtgaaaaggactaccacaacctcttctccccgcgctgctactactgcaacggccccatcctggataaagtggtgacagcccttgaccggacgtggcaccctgaacacttcttctgtgcacagtgtggagccttctttggtcccgaagggttccacgagaaggacggcaaggcctactgtcgcaaggactacttcgacatgttcgcacccaagtgtggcggctgcgcccgggccatcctggagaactatatctcagccctcaacacgctgtggcatcctgagtgctttgtgtgccgggaatgcttcacgccattcgtgaacggcagcttcttcgagcacgacgggcagccctactgtgaggtgcactaccacgagcggcgcggctcgctgtgttctggctgccagaagcccatcaccggccgctgcatcaccgccatggccaagaagttccaccccgagcacttcgtctgtgccttctgcctcaagcagctcaacaagggcaccttcaaggagcagaacgacaagccttactgtcagaactgcttcctcaagctcttctgctaggtgccctgcccctgtctctgccccccttccccagccagcatccccaactgcgactgtgacctagagacttcacccgggggtgaaggggtaaacccgactgaaactggaacccttgtcctccgctggtgcgggatggacagagggccgtgaggggtccccctgcttgtcttcacccctgccagagcctctgggccccctcctccctcctgtagctctccctaggctgcccactctccatcctccccaggggtagaggctgggggctccaccccagcccatgtacgtccccacgaactggcctggccagcaccccacactggagccatctcttcctcatatttcagcagtgcagccggggggcagggaagggcaggcagggtctgttggggtctctttttatccttattcctcccccgacctaattgtctttgttctgtgattattgggggacacccggctccctccagacaatgccagcataaatccatccatccaaaggcagagaaccaaaggggccatggaaggttctctgtgctcctcctacccttccagtgccctaggcctggcgactgcccctgccttttagacccgccctccccttttatacctgctcttgttctactgagaaaagcctctccagcaataatgttttctagtcacttcctccgtctccgggacggcgtgcctggacactgtaccgactttgatagatttctacactgaggtttgaattcatatcgcctgagttgcttttacttctctatacaaaatgattttgaagagattttaaagacgttcccttttgtattctcttcctcatccaccgccactgggcctgtcactgatggtggctctggtgtgaagtttgctttgtactgagggttggggtggggaagcaatttgtattttattgtttcttagcacaagcaggtgaactgggagcagctctgtgactccccctctttcacttcatagctcaccaggactgttttataaactgctgtatttggaaaccccttctttacttcccaggccagcaagctcttcactgaaactggttgaagggtgttgcacccttttgggcctagaattctgaactttatctgttctgtttctgtgggaggagaaggggaagtatgttttggggggctgcttcctgtctgagtaagccctcaggagcctctgctcccctgtgaacccactgaaccttctgagcccccactgcttctatggggctctctcttctgccttctcaggaaagctggtgtctgattttggccatcaggactctgacgtctctttggtcttgttgatttcctctgggcatatcccttccccagatctgctcctcccctttcacaggtgggatcggcactcagggggtctggaaagaaggtcataagggagcatgataggatttggggcagagggacaggctcctctggggaaaccccccagagctctttaccaaggatgaaagaggagccaggccttgggctcctgatgaggagaaaggggccccaccggggtctaatggtgacagtccaaaccactccactggcctcctggcagaagccgagtgtgctggggtctccgaagagggtccctcctttttgggggaaggtcagcccagcccctccaaaggtctgatgtctccactttcacccgcaggccttaccgctctgtttatagtgacccaccctagatcttccccaagagggactggggtttctggggtccattctctgagtcagtggttatttgaaaatttgattttgattttattttttctctgtaaacttccaagctggcttttcccatttcaattcctgtgatttatgccaataaagtttgcccatgattttca

SEQ ID NO: 901 - DNA, 5297 bp, Homo sapiens
  misc_feature (813)..(813): second gene starts at position 813
atgggggacgtgctgtccacgcacctggacgacgcccggcgccagcacatcgcagaaaaaaccgggaagatcctgacggagttcctccagttctatgaagaccagtatggcgtggctctcttcaacagcatgcgccatgagattgagggcacggggctgccgcaggcccagctgctctggcgcaaggtgccactggacgagcgcatcgtcttctcggggaacctcttccagcaccaggaggacagcaagaagtggagaaaccgcttcagcctcgtgccccacaactacgggctggtgctctacgaaaacaaagcggcctatgagcggcaggtcccaccacgagccgtcatcaacagtgcaggctacaaaatcctcacgtccgtggaccaatacctggagctcattggcaactccttaccagggaccacggcaaagtcgggcagtgcccccatcctcaagtgccccacacagttcccgctcatcctctggcatccttatgcgcgtcactactacttctgcatgatgacagaagccgagcaggacaagtggcaggctgtgctgcaggactgcatccggcactgcaacaatggaatccctgaggactccaaggtagagggccctgcgttcacagatgccatccgcatgtaccgacagtccaaggagctgtacggcacctgggagatgctgtgtgggaacgaggtgcagatcctgagcaacctggtgatggaggagctgggccctgagctgaaggcagagctcggcccgcggctgaaggggaaaccgcaggagcggcagcggcagtggatccagatctcggacgccgtgtaccacatggtgtacgagcaggccaaggcgcgcttcgaggaggtgctgtccaaggtgcagcaggtgcagccggccatgcaggccgtcatccgaactgacatggaccaaattatcacctccaaggagcaccttgccagcaagatccgagccttcatcctccccaaggcagaggtgtgcgtgcggaaccatgtccagccctacatcccatccatcctggaggccctgatggtccccaccagccagggcttcactgaggtgcgagatgtcttcttcaaggaggtcacggacatgaacctgaacgtcatcaacgagggcggcattgacaagctgggcgagtacatggagaagctgtcccggctggcgtaccaccccctgaagatgcagagctgctatgagaagatggagtcgctgcgactggacgggctgcagcagcgatttgatgtgtccagcacgtccgtgttcaagcagcgagcccagatccacatgcgggagcaaatggacaatgccgtgtatacgttcgagaccctcctgcaccaggagctggggaaggggcccaccaaggaggagctgtgcaagtccatccagcgggtcctggagcgggtgctgaagaaatacgactacgacagcagctctgtgcggaagaggttcttccgggaggcgctgctgcagatcagcatcccgttcctgctcaagaagctggcccctacctgcaagtcggagctgccccggttccaggagctgatcttcgaggactttgccaggttcatcctggtggaaaacacgtacgaggaggtggtgctgcagaccgtcatgaaggacatcctgcaggctgtgaaggaggccgcggtgcagaggaagcacaacctctaccgggacagcatggtcatgcacaacagcgaccccaacctgcacctgctggccgagggcgcccccatcgactggggcgaggagtacagcaacagcggcgggggcggcagccccagccccgtccagcgaggccctcaatggcacaatccttgaccccttagaccagtggcagcccagcagctcccgattcatccaccagcagcctcagtcctcatcacctgtgtacggctccagtgccaaaacttccagtgtctccaaccctcaggacagtgttggctctccgtgctcccgagtgggtgaggaggagcacgtctacagcttccccaacaagcagaaatcagctgagccttcacccaccgtaatgagcacgtccctgggcagcaacctttctgaactcgaccgcctgctgctggaactgaacgctgtacagcataacccgccaggcttccctgcagatgaggccaactcaagccccccgcttcctggggccctgagccccctctatggtgtcccagagactaacagccccttgggaggcaaagctgggcccctgacgaaagagaagcctaagcggaatgggggccggggcctggaggacgtgcggcccagtgtggagagtctcttggatgaactggagagctccgtgcccagccccgtccctgccatcactgtgaaccagggcgagatgagcagcccgcagcgcgtcacctccacccaacagcagacacgcatctcggcctcctctgccaccagggagctggacgagctgatggcttcgctgtcggatttcaagatccagggcctggagcaaagagcggatggggagcggtgctgggcggccggctggcctcgggacggcgggcggagcagccccggagggcaggacgagggagggttcatggcccaggggaagacagggagcagctcaccccctggggggcccccgaagcccgggagccagctggacagcatgctggggagcctgcagtctgacctgaacaagctgggggtcgccacagtcgccaaaggagtctgcggggcctgcaagaagcccatcgccgggcaggttgtgaccgccatggggaagacgtggcaccccgagcacttcgtctgcacccactgccaggaggagatcggatcccggaacttcttcgagcgggatggacagccctactgtgaaaaggactaccacaacctcttctccccgcgctgctactactgcaacggccccatcctggataaagtggtgacagcccttgaccggacgtggcaccctgaacacttcttctgtgcacagtgtggagccttctttggtcccgaagggttccacgagaaggacggcaaggcctactgtcgcaaggactacttcgacatgttcgcacccaagtgtggcggctgcgcccgggccatcctggagaactatatctcagccctcaacacgctgtggcatcctgagtgctttgtgtgccgggaatgcttcacgccattcgtgaacggcagcttcttcgagcacgacgggcagccctactgtgaggtgcactaccacgagcggcgcggctcgctgtgttctggctgccagaagcccatcaccggccgctgcatcaccgccatggccaagaagttccaccccgagcacttcgtctgtgccttctgcctcaagcagctcaacaagggcaccttcaaggagcagaacgacaagccttactgtcagaactgcttcctcaagctcttctgctaggtgccctgcccctgtctctgccccccttccccagccagcatccccaactgcgactgtgacctagagacttcacccgggggtgaaggggtaaacccgactgaaactggaacccttgtcctccgctggtgcgggatggacagagggccgtgaggggtccccctgcttgtcttcacccctgccagagcctctgggccccctcctccctcctgtagctctccctaggctgcccactctccatcctccccaggggtagaggctgggggctccaccccagcccatgtacgtccccacgaactggcctggccagcaccccacactggagccatctcttcctcatatttcagcagtgcagccggggggcagggaagggcaggcagggtctgttggggtctctttttatccttattcctcccccgacctaattgtctttgttctgtgattattgggggacacccggctccctccagacaatgccagcataaatccatccatccaaaggcagagaaccaaaggggccatggaaggttctctgtgctcctcctacccttccagtgccctaggcctggcgactgcccctgccttttagacccgccctccccttttatacctgctcttgttctactgagaaaagcctctccagcaataatgttttctagtcacttcctccgtctccgggacggcgtgcctggacactgtaccgactttgatagatttctacactgaggtttgaattcatatcgcctgagttgcttttacttctctatacaaaatgattttgaagagattttaaagacgttcccttttgtattctcttcctcatccaccgccactgggcctgtcactgatggtggctctggtgtgaagtttgctttgtactgagggttggggtggggaagcaatttgtattttattgtttcttagcacaagcaggtgaactgggagcagctctgtgactccccctctttcacttcatagctcaccaggactgttttataaactgctgtatttggaaaccccttctttacttcccaggccagcaagctcttcactgaaactggttgaagggtgttgcacccttttgggcctagaattctgaactttatctgttctgtttctgtgggaggagaaggggaagtatgttttggggggctgcttcctgtctgagtaagccctcaggagcctctgctcccctgtgaacccactgaaccttctgagcccccactgcttctatggggctctctcttctgccttctcaggaaagctggtgtctgattttggccatcaggactctgacgtctctttggtcttgttgatttcctctgggcatatcccttccccagatctgctcctcccctttcacaggtgggatcggcactcagggggtctggaaagaaggtcataagggagcatgataggatttggggcagagggacaggctcctctggggaaaccccccagagctctttaccaaggatgaaagaggagccaggccttgggctcctgatgaggagaaaggggccccaccggggtctaatggtgacagtccaaaccactccactggcctcctggcagaagccgagtgtgctggggtctccgaagagggtccctcctttttgggggaaggtcagcccagcccctccaaaggtctgatgtctccactttcacccgcaggccttaccgctctgtttatagtgacccaccctagatcttccccaagagggactggggtttctggggtccattctctgagtcagtggttatttgaaaatttgattttgattttattttttctctgtaaacttccaagctggcttttcccatttcaattcctgtgatttatgccaataaagtttgcccatgattttca

SEQ ID NO: 902 - DNA, 5246 bp, Homo sapiens
  misc_feature (774)..(774): second gene starts at position 774
atggggtggatgggagaaaaaaccgggaagatcctgacggagttcctccagttctatgaagaccagtatggcgtggctctcttcaacagcatgcgccatgagattgagggcacggggctgccgcaggcccagctgctctggcgcaaggtgccactggacgagcgcatcgtcttctcggggaacctcttccagcaccaggaggacagcaagaagtggagaaaccgcttcagcctcgtgccccacaactacgggctggtgctctacgaaaacaaagcggcctatgagcggcaggtcccaccacgagccgtcatcaacagtgcaggctacaaaatcctcacgtccgtggaccaatacctggagctcattggcaactccttaccagggaccacggcaaagtcgggcagtgcccccatcctcaagtgccccacacagttcccgctcatcctctggcatccttatgcgcgtcactactacttctgcatgatgacagaagccgagcaggacaagtggcaggctgtgctgcaggactgcatccggcactgcaacaatggaatccctgaggactccaaggtagagggccctgcgttcacagatgccatccgcatgtaccgacagtccaaggagctgtacggcacctgggagatgctgtgtgggaacgaggtgcagatcctgagcaacctggtgatggaggagctgggccctgagctgaaggcagagctcggcccgcggctgaaggggaaaccgcaggagcggcagcggcagtggatccagatctcggacgccgtgtaccacatggtgtacgagcaggccaaggcgcgcttcgaggaggtgctgtccaaggtgcagcaggtgcagccggccatgcaggccgtcatccgaactgacatggaccaaattatcacctccaaggagcaccttgccagcaagatccgagccttcatcctccccaaggcagaggtgtgcgtgcggaaccatgtccagccctacatcccatccatcctggaggccctgatggtccccaccagccagggcttcactgaggtgcgagatgtcttcttcaaggaggtcacggacatgaacctgaacgtcatcaacgagggcggcattgacaagctgggcgagtacatggagaagctgtcccggctggcgtaccaccccctgaagatgcagagctgctatgagaagatggagtcgctgcgactggacgggctgcagcagcgatttgatgtgtccagcacgtccgtgttcaagcagcgagcccagatccacatgcgggagcaaatggacaatgccgtgtatacgttcgagaccctcctgcaccaggagctggggaaggggcccaccaaggaggagctgtgcaagtccatccagcgggtcctggagcgggtgctgaagaaatacgactacgacagcagctctgtgcggaagaggttcttccgggaggcgctgctgcagatcagcatcccgttcctgctcaagaagctggcccctacctgcaagtcggagctgccccggttccaggagctgatcttcgaggactttgccaggttcatcctggtggaaaacacgtacgaggaggtggtgctgcagaccgtcatgaaggacatcctgcaggctgtgaaggaggccgcggtgcagaggaagcacaacctctaccgggacagcatggtcatgcacaacagcgaccccaacctgcacctgctggccgagggcgcccccatcgactggggcgaggagtacagcaacagcggcgggggcggcagccccagccccgttcttgtcggaggagaccccctactcatacccaactggaaaccacacataccaggagattgccgtgccaccccccgtccccccacccccgtccagcgaggccctcaatggcacaatccttgaccccttagaccagtggcagcccagcagctcccgattcatccaccagcagcctcagtcctcatcacctgtgtacggctccagtgccaaaacttccagtgtctccaaccctcaggacagtgttggctctccgtgctcccgagtgggtgaggaggagcacgtctacagcttccccaacaagcagaaatcagctgagccttcacccaccgtaatgagcacgtccctgggcagcaacctttctgaactcgaccgcctgctgctggaactgaacgctgtacagcataacccgccaggcttccctgcagatgaggccaactcaagccccccgcttcctggggccctgagccccctctatggtgtcccagagactaacagccccttgggaggcaaagctgggcccctgacgaaagagaagcctaagcggaatgggggccggggcctggaggacgtgcggcccagtgtggagagtctcttggatgaactggagagctccgtgcccagccccgtccctgccatcactgtgaaccagggcgagatgagcagcccgcagcgcgtcacctccacccaacagcagacacgcatctcggcctcctctgccaccagggagctggacgagctgatggcttcgctgtcggatttcaagttcatggcccaggggaagacagggagcagctcaccccctggggggcccccgaagcccgggagccagctggacagcatgctggggagcctgcagtctgacctgaacaagctgggggtcgccacagtcgccaaaggagtctgcggggcctgcaagaagcccatcgccgggcaggttgtgaccgccatggggaagacgtggcaccccgagcacttcgtctgcacccactgccaggaggagatcggatcccggaacttcttcgagcgggatggacagccctactgtgaaaaggactaccacaacctcttctccccgcgctgctactactgcaacggccccatcctggataaagtggtgacagcccttgaccggacgtggcaccctgaacacttcttctgtgcacagtgtggagccttctttggtcccgaagggttccacgagaaggacggcaaggcctactgtcgcaaggactacttcgacatgttcgcacccaagtgtggcggctgcgcccgggccatcctggagaactatatctcagccctcaacacgctgtggcatcctgagtgctttgtgtgccgggaatgcttcacgccattcgtgaacggcagcttcttcgagcacgacgggcagccctactgtgaggtgcactaccacgagcggcgcggctcgctgtgttctggctgccagaagcccatcaccggccgctgcatcaccgccatggccaagaagttccaccccgagcacttcgtctgtgccttctgcctcaagcagctcaacaagggcaccttcaaggagcagaacgacaagccttactgtcagaactgcttcctcaagctcttctgctaggtgccctgcccctgtctctgccccccttccccagccagcatccccaactgcgactgtgacctagagacttcacccgggggtgaaggggtaaacccgactgaaactggaacccttgtcctccgctggtgcgggatggacagagggccgtgaggggtccccctgcttgtcttcacccctgccagagcctctgggccccctcctccctcctgtagctctccctaggctgcccactctccatcctccccaggggtagaggctgggggctccaccccagcccatgtacgtccccacgaactggcctggccagcaccccacactggagccatctcttcctcatatttcagcagtgcagccggggggcagggaagggcaggcagggtctgttggggtctctttttatccttattcctcccccgacctaattgtctttgttctgtgattattgggggacacccggctccctccagacaatgccagcataaatccatccatccaaaggcagagaaccaaaggggccatggaaggttctctgtgctcctcctacccttccagtgccctaggcctggcgactgcccctgccttttagacccgccctccccttttatacctgctcttgttctactgagaaaagcctctccagcaataatgttttctagtcacttcctccgtctccgggacggcgtgcctggacactgtaccgactttgatagatttctacactgaggtttgaattcatatcgcctgagttgcttttacttctctatacaaaatgattttgaagagattttaaagacgttcccttttgtattctcttcctcatccaccgccactgggcctgtcactgatggtggctctggtgtgaagtttgctttgtactgagggttggggtggggaagcaatttgtattttattgtttcttagcacaagcaggtgaactgggagcagctctgtgactccccctctttcacttcatagctcaccaggactgttttataaactgctgtatttggaaaccccttctttacttcccaggccagcaagctcttcactgaaactggttgaagggtgttgcacccttttgggcctagaattctgaactttatctgttctgtttctgtgggaggagaaggggaagtatgttttggggggctgcttcctgtctgagtaagccctcaggagcctctgctcccctgtgaacccactgaaccttctgagcccccactgcttctatggggctctctcttctgccttctcaggaaagctggtgtctgattttggccatcaggactctgacgtctctttggtcttgttgatttcctctgggcatatcccttccccagatctgctcctcccctttcacaggtgggatcggcactcagggggtctggaaagaaggtcataagggagcatgataggatttggggcagagggacaggctcctctggggaaaccccccagagctctttaccaaggatgaaagaggagccaggccttgggctcctgatgaggagaaaggggccccaccggggtctaatggtgacagtccaaaccactccactggcctcctggcagaagccgagtgtgctggggtctccgaagagggtccctcctttttgggggaaggtcagcccagcccctccaaaggtctgatgtctccactttcacccgcaggccttaccgctctgtttatagtgacccaccctagatcttccccaagagggactggggtttctggggtccattctctgagtcagtggttatttgaaaatttgattttgattttattttttctctgtaaacttccaagctggcttttcccatttcaattcctgtgatttatgccaataaagtttgcccatgattttca

SEQ ID NO: 903 - DNA, 5156 bp, Homo sapiens
  misc_feature (774)..(774): second gene starts at position 774
atggggtggatgggagaaaaaaccgggaagatcctgacggagttcctccagttctatgaagaccagtatggcgtggctctcttcaacagcatgcgccatgagattgagggcacggggctgccgcaggcccagctgctctggcgcaaggtgccactggacgagcgcatcgtcttctcggggaacctcttccagcaccaggaggacagcaagaagtggagaaaccgcttcagcctcgtgccccacaactacgggctggtgctctacgaaaacaaagcggcctatgagcggcaggtcccaccacgagccgtcatcaacagtgcaggctacaaaatcctcacgtccgtggaccaatacctggagctcattggcaactccttaccagggaccacggcaaagtcgggcagtgcccccatcctcaagtgccccacacagttcccgctcatcctctggcatccttatgcgcgtcactactacttctgcatgatgacagaagccgagcaggacaagtggcaggctgtgctgcaggactgcatccggcactgcaacaatggaatccctgaggactccaaggtagagggccctgcgttcacagatgccatccgcatgtaccgacagtccaaggagctgtacggcacctgggagatgctgtgtgggaacgaggtgcagatcctgagcaacctggtgatggaggagctgggccctgagctgaaggcagagctcggcccgcggctgaaggggaaaccgcaggagcggcagcggcagtggatccagatctcggacgccgtgtaccacatggtgtacgagcaggccaaggcgcgcttcgaggaggtgctgtccaaggtgcagcaggtgcagccggccatgcaggccgtcatccgaactgacatggaccaaattatcacctccaaggagcaccttgccagcaagatccgagccttcatcctccccaaggcagaggtgtgcgtgcggaaccatgtccagccctacatcccatccatcctggaggccctgatggtccccaccagccagggcttcactgaggtgcgagatgtcttcttcaaggaggtcacggacatgaacctgaacgtcatcaacgagggcggcattgacaagctgggcgagtacatggagaagctgtcccggctggcgtaccaccccctgaagatgcagagctgctatgagaagatggagtcgctgcgactggacgggctgcagcagcgatttgatgtgtccagcacgtccgtgttcaagcagcgagcccagatccacatgcgggagcaaatggacaatgccgtgtatacgttcgagaccctcctgcaccaggagctggggaaggggcccaccaaggaggagctgtgcaagtccatccagcgggtcctggagcgggtgctgaagaaatacgactacgacagcagctctgtgcggaagaggttcttccgggaggcgctgctgcagatcagcatcccgttcctgctcaagaagctggcccctacctgcaagtcggagctgccccggttccaggagctgatcttcgaggactttgccaggttcatcctggtggaaaacacgtacgaggaggtggtgctgcagaccgtcatgaaggacatcctgcaggctgtgaaggaggccgcggtgcagaggaagcacaacctctaccgggacagcatggtcatgcacaacagcgaccccaacctgcacctgctggccgagggcgcccccatcgactggggcgaggagtacagcaacagcggcgggggcggcagccccagccccgtccagcgaggccctcaatggcacaatccttgaccccttagaccagtggcagcccagcagctcccgattcatccaccagcagcctcagtcctcatcacctgtgtacggctccagtgccaaaacttccagtgtctccaaccctcaggacagtgttggctctccgtgctcccgagtgggtgaggaggagcacgtctacagcttccccaacaagcagaaatcagctgagccttcacccaccgtaatgagcacgtccctgggcagcaacctttctgaactcgaccgcctgctgctggaactgaacgctgtacagcataacccgccaggcttccctgcagatgaggccaactcaagccccccgcttcctggggccctgagccccctctatggtgtcccagagactaacagccccttgggaggcaaagctgggcccctgacgaaagagaagcctaagcggaatgggggccggggcctggaggacgtgcggcccagtgtggagagtctcttggatgaactggagagctccgtgcccagccccgtccctgccatcactgtgaaccagggcgagatgagcagcccgcagcgcgtcacctccacccaacagcagacacgcatctcggcctcctctgccaccagggagctggacgagctgatggcttcgctgtcggatttcaagttcatggcccaggggaagacagggagcagctcaccccctggggggcccccgaagcccgggagccagctggacagcatgctggggagcctgcagtctgacctgaacaagctgggggtcgccacagtcgccaaaggagtctgcggggcctgcaagaagcccatcgccgggcaggttgtgaccgccatggggaagacgtggcaccccgagcacttcgtctgcacccactgccaggaggagatcggatcccggaacttcttcgagcgggatggacagccctactgtgaaaaggactaccacaacctcttctccccgcgctgctactactgcaacggccccatcctggataaagtggtgacagcccttgaccggacgtggcaccctgaacacttcttctgtgcacagtgtggagccttctttggtcccgaagggttccacgagaaggacggcaaggcctactgtcgcaaggactacttcgacatgttcgcacccaagtgtggcggctgcgcccgggccatcctggagaactatatctcagccctcaacacgctgtggcatcctgagtgctttgtgtgccgggaatgcttcacgccattcgtgaacggcagcttcttcgagcacgacgggcagccctactgtgaggtgcactaccacgagcggcgcggctcgctgtgttctggctgccagaagcccatcaccggccgctgcatcaccgccatggccaagaagttccaccccgagcacttcgtctgtgccttctgcctcaagcagctcaacaagggcaccttcaaggagcagaacgacaagccttactgtcagaactgcttcctcaagctcttctgctaggtgccctgcccctgtctctgccccccttccccagccagcatccccaactgcgactgtgacctagagacttcacccgggggtgaaggggtaaacccgactgaaactggaacccttgtcctccgctggtgcgggatggacagagggccgtgaggggtccccctgcttgtcttcacccctgccagagcctctgggccccctcctccctcctgtagctctccctaggctgcccactctccatcctccccaggggtagaggctgggggctccaccccagcccatgtacgtccccacgaactggcctggccagcaccccacactggagccatctcttcctcatatttcagcagtgcagccggggggcagggaagggcaggcagggtctgttggggtctctttttatccttattcctcccccgacctaattgtctttgttctgtgattattgggggacacccggctccctccagacaatgccagcataaatccatccatccaaaggcagagaaccaaaggggccatggaaggttctctgtgctcctcctacccttccagtgccctaggcctggcgactgcccctgccttttagacccgccctccccttttatacctgctcttgttctactgagaaaagcctctccagcaataatgttttctagtcacttcctccgtctccgggacggcgtgcctggacactgtaccgactttgatagatttctacactgaggtttgaattcatatcgcctgagttgcttttacttctctatacaaaatgattttgaagagattttaaagacgttcccttttgtattctcttcctcatccaccgccactgggcctgtcactgatggtggctctggtgtgaagtttgctttgtactgagggttggggtggggaagcaatttgtattttattgtttcttagcacaagcaggtgaactgggagcagctctgtgactccccctctttcacttcatagctcaccaggactgttttataaactgctgtatttggaaaccccttctttacttcccaggccagcaagctcttcactgaaactggttgaagggtgttgcacccttttgggcctagaattctgaactttatctgttctgtttctgtgggaggagaaggggaagtatgttttggggggctgcttcctgtctgagtaagccctcaggagcctctgctcccctgtgaacccactgaaccttctgagcccccactgcttctatggggctctctcttctgccttctcaggaaagctggtgtctgattttggccatcaggactctgacgtctctttggtcttgttgatttcctctgggcatatcccttccccagatctgctcctcccctttcacaggtgggatcggcactcagggggtctggaaagaaggtcataagggagcatgataggatttggggcagagggacaggctcctctggggaaaccccccagagctctttaccaaggatgaaagaggagccaggccttgggctcctgatgaggagaaaggggccccaccggggtctaatggtgacagtccaaaccactccactggcctcctggcagaagccgagtgtgctggggtctccgaagagggtccctcctttttgggggaaggtcagcccagcccctccaaaggtctgatgtctccactttcacccgcaggccttaccgctctgtttatagtgacccaccctagatcttccccaagagggactggggtttctggggtccattctctgagtcagtggttatttgaaaatttgattttgattttattttttctctgtaaacttccaagctggcttttcccatttcaattcctgtgatttatgccaataaagtttgcccatgattttca

SEQ ID NO: 904 - DNA, 5258 bp, Homo sapiens
  misc_feature (774)..(774): second gene starts at position 774
atggggtggatgggagaaaaaaccgggaagatcctgacggagttcctccagttctatgaagaccagtatggcgtggctctcttcaacagcatgcgccatgagattgagggcacggggctgccgcaggcccagctgctctggcgcaaggtgccactggacgagcgcatcgtcttctcggggaacctcttccagcaccaggaggacagcaagaagtggagaaaccgcttcagcctcgtgccccacaactacgggctggtgctctacgaaaacaaagcggcctatgagcggcaggtcccaccacgagccgtcatcaacagtgcaggctacaaaatcctcacgtccgtggaccaatacctggagctcattggcaactccttaccagggaccacggcaaagtcgggcagtgcccccatcctcaagtgccccacacagttcccgctcatcctctggcatccttatgcgcgtcactactacttctgcatgatgacagaagccgagcaggacaagtggcaggctgtgctgcaggactgcatccggcactgcaacaatggaatccctgaggactccaaggtagagggccctgcgttcacagatgccatccgcatgtaccgacagtccaaggagctgtacggcacctgggagatgctgtgtgggaacgaggtgcagatcctgagcaacctggtgatggaggagctgggccctgagctgaaggcagagctcggcccgcggctgaaggggaaaccgcaggagcggcagcggcagtggatccagatctcggacgccgtgtaccacatggtgtacgagcaggccaaggcgcgcttcgaggaggtgctgtccaaggtgcagcaggtgcagccggccatgcaggccgtcatccgaactgacatggaccaaattatcacctccaaggagcaccttgccagcaagatccgagccttcatcctccccaaggcagaggtgtgcgtgcggaaccatgtccagccctacatcccatccatcctggaggccctgatggtccccaccagccagggcttcactgaggtgcgagatgtcttcttcaaggaggtcacggacatgaacctgaacgtcatcaacgagggcggcattgacaagctgggcgagtacatggagaagctgtcccggctggcgtaccaccccctgaagatgcagagctgctatgagaagatggagtcgctgcgactggacgggctgcagcagcgatttgatgtgtccagcacgtccgtgttcaagcagcgagcccagatccacatgcgggagcaaatggacaatgccgtgtatacgttcgagaccctcctgcaccaggagctggggaaggggcccaccaaggaggagctgtgcaagtccatccagcgggtcctggagcgggtgctgaagaaatacgactacgacagcagctctgtgcggaagaggttcttccgggaggcgctgctgcagatcagcatcccgttcctgctcaagaagctggcccctacctgcaagtcggagctgccccggttccaggagctgatcttcgaggactttgccaggttcatcctggtggaaaacacgtacgaggaggtggtgctgcagaccgtcatgaaggacatcctgcaggctgtgaaggaggccgcggtgcagaggaagcacaacctctaccgggacagcatggtcatgcacaacagcgaccccaacctgcacctgctggccgagggcgcccccatcgactggggcgaggagtacagcaacagcggcgggggcggcagccccagccccgtccagcgaggccctcaatggcacaatccttgaccccttagaccagtggcagcccagcagctcccgattcatccaccagcagcctcagtcctcatcacctgtgtacggctccagtgccaaaacttccagtgtctccaaccctcaggacagtgttggctctccgtgctcccgagtgggtgaggaggagcacgtctacagcttccccaacaagcagaaatcagctgagccttcacccaccgtaatgagcacgtccctgggcagcaacctttctgaactcgaccgcctgctgctggaactgaacgctgtacagcataacccgccaggcttccctgcagatgaggccaactcaagccccccgcttcctggggccctgagccccctctatggtgtcccagagactaacagccccttgggaggcaaagctgggcccctgacgaaagagaagcctaagcggaatgggggccggggcctggaggacgtgcggcccagtgtggagagtctcttggatgaactggagagctccgtgcccagccccgtccctgccatcactgtgaaccagggcgagatgagcagcccgcagcgcgtcacctccacccaacagcagacacgcatctcggcctcctctgccaccagggagctggacgagctgatggcttcgctgtcggatttcaagatccagggcctggagcaaagagcggatggggagcggtgctgggcggccggctggcctcgggacggcgggcggagcagccccggagggcaggacgagggagggttcatggcccaggggaagacagggagcagctcaccccctggggggcccccgaagcccgggagccagctggacagcatgctggggagcctgcagtctgacctgaacaagctgggggtcgccacagtcgccaaaggagtctgcggggcctgcaagaagcccatcgccgggcaggttgtgaccgccatggggaagacgtggcaccccgagcacttcgtctgcacccactgccaggaggagatcggatcccggaacttcttcgagcgggatggacagccctactgtgaaaaggactaccacaacctcttctccccgcgctgctactactgcaacggccccatcctggataaagtggtgacagcccttgaccggacgtggcaccctgaacacttcttctgtgcacagtgtggagccttctttggtcccgaagggttccacgagaaggacggcaaggcctactgtcgcaaggactacttcgacatgttcgcacccaagtgtggcggctgcgcccgggccatcctggagaactatatctcagccctcaacacgctgtggcatcctgagtgctttgtgtgccgggaatgcttcacgccattcgtgaacggcagcttcttcgagcacgacgggcagccctactgtgaggtgcactaccacgagcggcgcggctcgctgtgttctggctgccagaagcccatcaccggccgctgcatcaccgccatggccaagaagttccaccccgagcacttcgtctgtgccttctgcctcaagcagctcaacaagggcaccttcaaggagcagaacgacaagccttactgtcagaactgcttcctcaagctcttctgctaggtgccctgcccctgtctctgccccccttccccagccagcatccccaactgcgactgtgacctagagacttcacccgggggtgaaggggtaaacccgactgaaactggaacccttgtcctccgctggtgcgggatggacagagggccgtgaggggtccccctgcttgtcttcacccctgccagagcctctgggccccctcctccctcctgtagctctccctaggctgcccactctccatcctccccaggggtagaggctgggggctccaccccagcccatgtacgtccccacgaactggcctggccagcaccccacactggagccatctcttcctcatatttcagcagtgcagccggggggcagggaagggcaggcagggtctgttggggtctctttttatccttattcctcccccgacctaattgtctttgttctgtgattattgggggacacccggctccctccagacaatgccagcataaatccatccatccaaaggcagagaaccaaaggggccatggaaggttctctgtgctcctcctacccttccagtgccctaggcctggcgactgcccctgccttttagacccgccctccccttttatacctgctcttgttctactgagaaaagcctctccagcaataatgttttctagtcacttcctccgtctccgggacggcgtgcctggacactgtaccgactttgatagatttctacactgaggtttgaattcatatcgcctgagttgcttttacttctctatacaaaatgattttgaagagattttaaagacgttcccttttgtattctcttcctcatccaccgccactgggcctgtcactgatggtggctctggtgtgaagtttgctttgtactgagggttggggtggggaagcaatttgtattttattgtttcttagcacaagcaggtgaactgggagcagctctgtgactccccctctttcacttcatagctcaccaggactgttttataaactgctgtatttggaaaccccttctttacttcccaggccagcaagctcttcactgaaactggttgaagggtgttgcacccttttgggcctagaattctgaactttatctgttctgtttctgtgggaggagaaggggaagtatgttttggggggctgcttcctgtctgagtaagccctcaggagcctctgctcccctgtgaacccactgaaccttctgagcccccactgcttctatggggctctctcttctgccttctcaggaaagctggtgtctgattttggccatcaggactctgacgtctctttggtcttgttgatttcctctgggcatatcccttccccagatctgctcctcccctttcacaggtgggatcggcactcagggggtctggaaagaaggtcataagggagcatgataggatttggggcagagggacaggctcctctggggaaaccccccagagctctttaccaaggatgaaagaggagccaggccttgggctcctgatgaggagaaaggggccccaccggggtctaatggtgacagtccaaaccactccactggcctcctggcagaagccgagtgtgctggggtctccgaagagggtccctcctttttgggggaaggtcagcccagcccctccaaaggtctgatgtctccactttcacccgcaggccttaccgctctgtttatagtgacccaccctagatcttccccaagagggactggggtttctggggtccattctctgagtcagtggttatttgaaaatttgattttgattttattttttctctgtaaacttccaagctggcttttcccatttcaattcctgtgatttatgccaataaagtttgcccatgattttca

SEQ ID NO: 905 - DNA, 2364 bp, Homo sapiens
  misc_feature (374)..(374): second gene starts at position 374
atgccccctaaaaagggaggtgatggaattaaaccacccccaatcattggaagatttggaacctcactgaaaattggtattgttggattgccaaatgttgggaaatctactttcttcaatgtgttaaccaatagtcaggcttcagcagaaaacttcccgttctgcactattgatcctaatgagagcagagtacctgtgccagatgaaaggtttgactttctttgtcaataccacaaaccagcaagcaaaattcctgcctttctaaatgtggtggatattgctggccttgtgaaaggagctcacaatgggcagggcctggggaatgcttttttatctcatattagtgcctgtgatggcatctttcatctaacacaacagcagagaggggcagcaggatgaatgtgggcacagcgcacagcgaggtgaaccccaacacgcgggtgatgaacagccgtggcatctggctctcctacgtgctggccatcggtctcctccacatcgtgctgctgagcatcccgtttgtgagtgtccctgtcgtctggaccctcaccaacctcattcacaacatgggcatgtatatcttcctgcacacggtgaaggggacaccctttgagaccccggaccagggcaaggcgaggctgctaacccactgggagcagatggattatggggtccagttcacggcctctcggaagttcttgaccatcacacccatcgtgctgtacttcctcaccagcttctacactaagtacgaccagatccattttgtgctcaacaccgtgtccctgatgagcgtgcttatccccaagctgccccagctccacggagtccggatttttggaatcaataagtactgagagtgcagccccttcccctgcccagggtggcaggggaggggtagggtaaaaggcatgtgctgcaacactgaagacagaaagaagaagcctctggacactgccagagatgggggttgagcctctggcctaatttcccccctcgcttcccccagtagccaacttggagtagcttgtagtggggttggggtaggccccctgggctctgaccttttctgaattttttgatcttttccttttgctttttgaatagagactccatggagttggtcatggaatgggctgggctcctgggctgaacatggaccacgcagttgcgacaggaggccaggggaaaaacccctgctcacttgtttgccctcaggcagccaaagcactttaacccctgcatagggagcagagggcggtacggcttctggattgtttcactgtgattcctaggttttttcgatgccacgcagtgtgtgcttttgtgtatggaagcaagtgtgggatgggtctttgcctttctgggtagggagctgtctaatccaagtcccaggcttttggcagcttctctgcaacccaccgtgggtcctggttgggagtggggagggtcaggttggggaaagatggggtagagtgtagatggcttggttccagaggtgagggggccagggctgctgccatcctggcctggtggaggttggggagctgtaggagagctagtgagtcgagacttagaagaatggggccacatagcagcagaggactggtgtaagggagggaggggtagggacagaagctagacccaatctcctttgggatgtgggcagggagggaagcaggcttggagggttaatttacccacagaatgtgatagtaataggggagggaggctgctgtgggtttaactcctgggttggctgttgggtagacaggtggggaaaaggcccgtgagtcattgtaagcacaggtccaacttggccctgactcctgcgggggtatggggaagctgtgacagaaacgatgggtgctgtggtcctctgcaggccctcaccccttaacttcctcatacagactggcactgggcagggcctctcatgtggcagccacatgtggcgttgtgaggccaccccatgtggggtctgtggtgagagtcctgtaggatccctgctcaagcagcacagaggaaggggcaagacgtggcctgtaggcactgtctcagcctgcagagaagaaagtgaggccgggagcctgagcctgggctggagccttctcccctccccagttggactaggggcagtgttaattttgaaaaggtgtgggtccctgtgtcctcttccaggggtccaagggaacgggagaggtcactgggcctgttttctccctcctgaccctgcatctcccaccccgtgtatcatagggaactttcaccttaaaatctttctaagcaaagtgtgaataggatttttactccctttgtacagtattctgagaaacgcaaataaaagggcaacatgtttctgtt

SEQ ID NO: 906 - DNA, 2449 bp, Homo sapiens
  misc_feature (459)..(459): second gene starts at position 459
ggtctgcgcgcaggtgccgctcggcgcccggcccgcccgttccgccgctgtcgccgccgtcgtgcgtgccgctcggcggaggggacgggcctgcgttctctcctccttcctccccgcctccagctgccggcaggacctttctctcgctgccgctgggaccccgtgtcatcgcccaggccgagcacggaaatctactttcttcaatgtgttaaccaatagtcaggcttcagcagaaaacttcccgttctgcactattgatcctaatgagagcagagtacctgtgccagatgaaaggtttgactttctttgtcaataccacaaaccagcaagcaaaattcctgcctttctaaatgtggtggatattgctggccttgtgaaaggagctcacaatgggcagggcctggggaatgcttttttatctcatattagtgcctgtgatggcatctttcatctaacacaacagcagagaggggcagcaggatgaatgtgggcacagcgcacagcgaggtgaaccccaacacgcgggtgatgaacagccgtggcatctggctctcctacgtgctggccatcggtctcctccacatcgtgctgctgagcatcccgtttgtgagtgtccctgtcgtctggaccctcaccaacctcattcacaacatgggcatgtatatcttcctgcacacggtgaaggggacaccctttgagaccccggaccagggcaaggcgaggctgctaacccactgggagcagatggattatggggtccagttcacggcctctcggaagttcttgaccatcacacccatcgtgctgtacttcctcaccagcttctacactaagtacgaccagatccattttgtgctcaacaccgtgtccctgatgagcgtgcttatccccaagctgccccagctccacggagtccggatttttggaatcaataagtactgagagtgcagccccttcccctgcccagggtggcaggggaggggtagggtaaaaggcatgtgctgcaacactgaagacagaaagaagaagcctctggacactgccagagatgggggttgagcctctggcctaatttcccccctcgcttcccccagtagccaacttggagtagcttgtagtggggttggggtaggccccctgggctctgaccttttctgaattttttgatcttttccttttgctttttgaatagagactccatggagttggtcatggaatgggctgggctcctgggctgaacatggaccacgcagttgcgacaggaggccaggggaaaaacccctgctcacttgtttgccctcaggcagccaaagcactttaacccctgcatagggagcagagggcggtacggcttctggattgtttcactgtgattcctaggttttttcgatgccacgcagtgtgtgcttttgtgtatggaagcaagtgtgggatgggtctttgcctttctgggtagggagctgtctaatccaagtcccaggcttttggcagcttctctgcaacccaccgtgggtcctggttgggagtggggagggtcaggttggggaaagatggggtagagtgtagatggcttggttccagaggtgagggggccagggctgctgccatcctggcctggtggaggttggggagctgtaggagagctagtgagtcgagacttagaagaatggggccacatagcagcagaggactggtgtaagggagggaggggtagggacagaagctagacccaatctcctttgggatgtgggcagggagggaagcaggcttggagggttaatttacccacagaatgtgatagtaataggggagggaggctgctgtgggtttaactcctgggttggctgttgggtagacaggtggggaaaaggcccgtgagtcattgtaagcacaggtccaacttggccctgactcctgcgggggtatggggaagctgtgacagaaacgatgggtgctgtggtcctctgcaggccctcaccccttaacttcctcatacagactggcactgggcagggcctctcatgtggcagccacatgtggcgttgtgaggccaccccatgtggggtctgtggtgagagtcctgtaggatccctgctcaagcagcacagaggaaggggcaagacgtggcctgtaggcactgtctcagcctgcagagaagaaagtgaggccgggagcctgagcctgggctggagccttctcccctccccagttggactaggggcagtgttaattttgaaaaggtgtgggtccctgtgtcctcttccaggggtccaagggaacgggagaggtcactgggcctgttttctccctcctgaccctgcatctcccaccccgtgtatcatagggaactttcaccttaaaatctttctaagcaaagtgtgaataggatttttactccctttgtacagtattctgagaaacgcaaataaaagggcaacatgtttctgtt

SEQ ID NO: 907 - DNA, 3422 bp, Homo sapiens
  misc_feature (2685)..(2685): second gene starts at position 2685
atggaaaaactccatgggcatgtgtctgcccatccagacatcctctccttggagaaccggtgcctggctatgctccctgacttacagcccttggagaaactacatcagcatgtatctacccactcagatatcctctccttgaagaaccagtgcctagccacgcttcctgacctgaagaccatggaaaaaccacatggatatgtgtctgcccacccagacatcctctccttggagaaccagtgcctggccacactttctgacctgaagaccatggagaaaccacatggacatgtttctgcccacccagacatcctctccttggagaaccggtgcctggccaccctctctagtctaaagagcactgtgtctgccagccccttgttccagagtctacagatatctcacatgacgcaagctgatttgtaccgtgtgaacaacagcaattgcctgctctctgagcctccaagttggagggctcagcatttctctaagggactagacctttcaacctgccctatagccctgaaatccatctctgccacagagacagctcaggaagcaactttgggtcgttggtttgattcagaagagaagaaaggggcagagacccaaatgccttcttatagtctgagcttgggagaggaggaggaggtggaggatctggccgtgaagctcacctctggagactctgaatctcatccagagcctactgaccatgtccttcaggaaaagaagatggctctactgagcttgctgtgctctactctggtctcagaagtaaacatgaacaatacatctgaccccaccctggctgccatttttgaaatctgtcgtgaacttgccctcctggagcctgagtttatcctcaaggcatctttgtatgccaggcagcagctgaacgtccggaatgtggccaataacatcttggccattgctgctttcttgccggcgtgtcgcccccacctgcgacgatatttctgtgccattgtccagctgccttctgactggatccaggtggctgagctttaccagagcctggctgagggagataagaataagctggtgcccctgcccgcctgtctccgtactgccatgacggacaaatttgcccagtttgacgagtaccagctggctaagtacaaccctcggaagcaccgggccaagagacacccccgccggccaccccgctctccagggatggagcctccattttctcacagatgttttccaaggtacatagggtttctcagagaagagcagagaaagtttgagaaggccggtgatacagtgtcagagaaaaagaatcctccaaggttcaccctgaagaagctggttcagcgactgcacatccacaagcctgcccagcacgttcaagccctgctgggttacagatacccctccaacctacagctcttttctcgaagtcgccttcctgggccttgggattctagcagagctgggaagaggatgaagctgtctaggccagagacctgggagcgggagctgagcctacgggggaacaaagcgtcggtctgggaggaactcattgaaaatgggaagcttcccttcatggccatgcttcggaacctgtgcaacctgctgcgggttggaatcagttcccgccaccatgagctcattctccagagactccagcatgcgaagtcggtgatccacagtcggcagtttccattcagatttcttaacgcccatgatgccattgatgccctcgaggctcaactcagaaatcaagcattgccctttccttcgaatataacactgatgaggcggatactaactagaaatgaaaagaaccgtcccaggcggaggtttctttgccacctaagccgtcagcagcttcggatggcaatgaggatacctgtgttgtatgagcagctcaagagggagaagctgagagtacacaaggccagacagtggaaatatgatggtgagatgctgaacaggtaccgacaggccctagagacagctgtgaacctctctgtgaagcacagcctgcccctgctgccaggccgcactgtcttggtctatctgacagatgctaatgcagacaggctctgtccaaagagcaacccacaagggcccccgctgaactatgcactgctgttgattgggatgatgatcacgagggcggagcaggtggacgtcgtgctgtgtggaggtgacactctgaagactgcagtgcttaaggcagaagaaggcatcctgaagactgccatcaagctccaggctcaagtccaggagtttgatgaaaatgatggatggtccctgaatacttttgggaaatacctgctgtctctggctggccaaagggttcctgtggacagggtcatcctccttggccaaagcatggatgatggaatgataaatgtggccaaacagctttactggcagcgtgtgaattccaagtgcctctttgttggtatcctcctaagaagggtacaatacctgtcaacagatttgaatcccaatgatgtgacactctcaggctgtactgatgcgatactgaagttcattgcagagcatggggcctcccatcttctggaacatgtgggccaaatggacaaaatattcaagattccaccacccccaggaaagacaggggtccagtctctccggccactggaagaggacactccaagccccttggctcctgtttcccagcaagggcttttctgggaaagtgaggccaccatggctctggagaagtctcttgtccggctccttctgcttgtcctgatactgctggtgctgggctgggtccagccttccctgggcaaggaatcccgggccaagaaattccagcggcagcatatggactcagacagttcccccagcagcagctccacctactgtaaccaaatgatgaggcgccggaatatgacacaggggcggtgcaaaccagtgaacacctttgtgcacgagcccctggtagatgtccagaatgtctgtttccaggaaaaggtcacctgcaagaacgggcagggcaactgctacaagagcaactccagcatgcacatcacagactgccgcctgacaaacggctccaggtaccccaactgtgcataccggaccagcccgaaggagagacacatcattgtggcctgtgaagggagcccatatgtgccagtccactttgatgcttctgtggaggactctacctaaggtcagagcagcgagataccccacctccctcaacctcatcctctccacagctgcctcttccctcttccttccctgctgtgaaagaagtaactacagttagggctcctattcaacacacacatgcttccctttcctgagtcccatccctgcgtgattttgggggtgaagagtgggttgtgaggtgggccccatgttaacccctccactctttctttcaataaaacgcagttgcaaacacctga

SEQ ID NO: 908 - DNA, 3422 bp, Homo sapiens; identical to SEQ ID NO: 907
  misc_feature (2685)..(2685): second gene starts at position 2685

SEQ ID NO: 909 - DNA, 3422 bp, Homo sapiens; identical to SEQ ID NO: 907
  misc_feature (2685)..(2685): second gene starts at position 2685

SEQ ID NO: 910 - DNA, 3422 bp, Homo sapiens; identical to SEQ ID NO: 907
  misc_feature (2685)..(2685): second gene starts at position 2685

SEQ ID NO: 911 - DNA, 25248 bp, Homo sapiens
  misc_feature (964)..(964): second gene starts at position 964
atggggaaggtgaaggtcggagtcaacggatttggtcgtattgggcgcctggtcaccagggctgcttttaactctggtaaagtggatattgttgccatcaatgaccccttcattgacctcaactacatggtttacatgttccaatatgattccacccatggcaaattccatggcaccgtcaaggctgagaacgggaagcttgtcatcaatggaaatcccatcaccatcttccaggagcgagatccctccaaaatcaagtggggcgatgctggcgctgagtacgtcgtggagtccactggcgtcttcaccaccatggagaaggctggggctcatttgcaggggggagccaaaagggtcatcatctctgccccctctgctgatgcccccatgttcgtcatgggtgtgaaccatgagaagtatgacaacagcctcaagatcatcagcaatgcctcctgcaccaccaactgcttagcacccctggccaaggtcatccatgacaactttggtatcgtggaaggactcatgaccacagtccatgccatcactgccacccagaagactgtggatggcccctccgggaaactgtggcgtgatggccgcggggctctccagaacatcatccctgcctctactggcgctgccaaggctgtgggcaaggtcatccctgagctgaacgggaagctcactggcatggccttccgtgtccccactgccaacgtgtcagtggtggacctgacctgccgtctagaaaaacctgccaaatatgatgacatcaagaaggtggtgaagcaggcgtcggagggccccctcaagggcatcctgggctacactgagcaccaggtggtctcctctgacttcaacagcgacacccactcctccacctttgacgctggggctggcattgccctcaacgaccactttgtcaagctcatttcctggtatgacaacgaatttggctacagcggctacagcttcaccaccacggccgagcgggaaatcgtgcgcgacatcaaggagaagctgtgctacgtcgccctggacttcgagcaggagatggccaccgccgcatcctcctcttctctggagaagagctacgagctgcccgatggccaggtcatcaccattggcaatgagcggttccggtgtccggaggcgctgttccagccttccttcctgggtatggaatcttgcggcatccacgagaccaccttcaactccatcatgaagtgtgacgtggacatccgcaaagacctgtacgccaacacggtgctgtcgggcggcaccaccatgtacccgggcattgccgacaggatgcagaaggagatcaccgccctggcgcccagcaccatgaagatcaagatcatcgcacccccagagcgcaagtactcggtgtggatcggtggctccatcctggcctcactgtccaccttccagcagatgtggattagcaagcaggagtacgacgagtcgggcccctccatcgtccaccgcaaatgcttctaaacggactcagcagatgcgtagcatttgctgcatgggttaattgagaatagaaatttgcccctggcaaatgcacacacctcatgctagcctcacgaaactggaataagccttcgaaaagaaattgtccttgaagcttgtatctgatatcagcactggattgtagaacttgttgctgattttgaccttgtattgaagttaactgttccccttggtatttgtttaataccctgtacatatctttgagttcaacctttagtacgtgtggcttggtcacttcgtggctaaggtaagaacgtgcttgtggaagacaagtctgtggcttggtgagtctgtgtggccagcagcctctgatctgtgcagggtattaacgtgtcagggctgagtgttctgggatttctctagaggctggcaagaaccagttgttttgtcttgcgggtctgtcagggttggaaagtccaagccgtaggacccagtttcctttcttagctgatgtctttggccagaacaccgtgggctgttacttgctttgagttggaagcggtttgcatttacgcctgtaaatgtattcattcttaatttatgtaaggttttttttgtacgcaattctcgattctttgaagagatgacaacaaattttggttttctactgttatgtgagaacattaggccccagcaacacgtcattgtgtaaggaaaaataaaagtgctgccgtaaccgtctcagtcgccgctgccagctctcgcactctgttcttccgccgctccgccgtcgcgtttctctgccggtcgcaatggaagaagagatcgccgcgctggtcattgacaatggctccggcatgtgcaaagctggttttgctggggacgacgctccccgagccgtgtttccttccatcgtcgggcgccccagacaccagggcgtcatggtgggcatgggccagaaggactcctacgtgggcgacgaggcccagagcaagcgtggcatcctgaccctgaagtaccccattgagcatggcatcgtcaccaactgggacgacatggagaagatctggcaccacaccttctacaacgagctgcgcgtggccccggaggagcacccagtgctgctgaccgaggcccccctgaaccccaaggccaacagagagaagatgactcagattatgtttgagaccttcaacaccccggccatgtacgtggccatccaggccgtgctgtccctctacgcctctgggcgcaccactggcattgtcatggactctggagacggggtcacccacacggtgcccatctacgagggctacgccctcccccacgccatcctgcgtctggacctggctggccgggacctgaccgactacctcatgaagatcctcactgagcgaggctacagcttcaccaccacggccgagcgggaaatcgtgcgcgacatcaaggagaagctgtgctacgtcgccctggacttcgagcaggagatggccaccgccgcatcctcctcttctctggagaagagctacgagctgcccgatggccaggtcatcaccattggcaatgagcggttccggtgtccggaggcgctgttccagccttccttcctgggtatggaatcttgcggcatccacgagaccaccttcaactccatcatgaagtgtgacgtggacatccgcaaagacctgtacgccaacacggtgctgtcgggcggcaccaccatgtacccgggcattgccgacaggatgcagaaggagatcaccgccctggcgcccagcaccatgaagatcaagatcatcgcacccccagagcgcaagtactcggtgtggatcggtggctccatcctggcctcactgtccaccttccagcagatgtggattagcaagcaggagtacgacgagtcgggcccctccatcgtccaccgcaaatgcttctaaacggactcagcagatgcgtagcatttgctgcatgggttaattgagaatagaaatttgcccctggcaaatgcacacacctcatgctagcctcacgaaactggaataagccttcgaaaagaaattgtccttgaagcttgtatctgatatcagcactggattgtagaacttgttgctgattttgaccttgtattgaagttaactgttccccttggtatttgtttaataccctgtacatatctttgagttcaacctttagtacgtgtggcttggtcacttcgtggctaaggtaagaacgtgcttgtggaagacaagtctgtggcttggtgagtctgtgtggccagcagcctctgatctgtgcagggtattaacgtgtcagggctgagtgttctgggatttctctagaggctggcaagaaccagttgttttgtcttgcgggtctgtcagggttggaaagtccaagccgtaggacccagtttcctttcttagctgatgtctttggccagaacaccgtgggctgttacttgctttgagttggaagcggtttgcatttacgcctgtaaatgtattcattcttaatttatgtaaggttttttttgtacgcaattctcgattctttgaagagatgacaacaaattttggttttctactgttatgtgagaacattaggccccagcaacacgtcattgtgtaaggaaaaataaaagtgctgccgtaaccgtctcagtcgccgctgccagctctcgcactctgttcttccgccgctccgccgtcgcgtttctctgccggtcgcaatggaagaagagatcgccgcgctggtcattgacaatggctccggcatgtgcaaagctggttttgctggggacgacgctccccgagccgtgtttccttccatcgtcgggcgccccagacaccagggcgtcatggtgggcatgggccagaaggactcctacgtgggcgacgaggcccagagcaagcgtggcatcctgaccctgaagtaccccattgagcatggcatcgtcaccaactgggacgacatggagaagatctggcaccacaccttctacaacgagctgcgcgtggccccggaggagcacccagtgctgctgaccgaggcccccctgaaccccaaggccaacagagagaagatgactcagattatgtttgagaccttcaacaccccggccatgtacgtggccatccaggccgtgctgtccctctacgcctctgggcgcaccactggcattgtcatggactctggagacggggtcacccacacggtgcccatctacgagggctacgccctcccccacgccatcctgcgtctggacctggctggccgggacctgaccgactacctcatgaagatcctcactgagcgaggctacagcttcaccaccacggccgagcgggaaatcgtgcgcgacatcaaggagaagctgtgctacgtcgccctggacttcgagcaggagatggccaccgccgcatcctcctcttctctggagaagagctacgagctgcccgatggccaggtcatcaccattggcaatgagcggttccggtgtccggaggcgctgttccagccttccttcctgggtatggaatcttgcggcatccacgagaccaccttcaactccatcatgaagtgtgacgtggacatccgcaaagacctgtacgccaacacggtgctgtcgggcggcaccaccatgtacccgggcattgccgacaggatgcagaaggagatcaccgccctggcgcccagcaccatgaagatcaagatcatcgcacccccagagcgcaagtactcggtgtggatcggtggctccatcctggcctcactgtccaccttccagcagatgtggattagcaagcaggagtacgacgagtcgggcccctccatcgtccaccgcaaatgcttctaaacggactcagcagatgcgtagcatttgctgcatgggttaattgagaatagaaatttgcccctggcaaatgcacacacctcatgctagcctcacgaaactggaataagccttcgaaaagaaattgtccttgaagcttgtatctgatatcagcactggattgtagaacttgttgctgattttgaccttgtattgaagttaactgttccccttggtatttgtttaataccctgtacatatctttgagttcaacctttagtacgtgtggcttggtcacttcgtggctaaggtaagaacgtgcttgtggaagacaagtctgtggcttggtgagtctgtgtggccagcagcctctgatctgtgcagggtattaacgtgtcagggctgagtgttctgggatttctctagaggctggcaagaaccagttgttttgtcttgcgggtctgtcagggttggaaagtccaagccgtaggacccagtttcctttcttagctgatgtctttggccagaacaccgtgggctgttacttgctttgagttggaagcggtttgcatttacgcctgtaaatgtattcattcttaatttatgtaaggttttttttgtacgcaattctcgattctttgaagagatgacaacaaattttggttttctactgttatgtgagaacattaggccccagcaacacgtcattgtgtaaggaaaaataaaagtgctgccgtaaccgtctcagtcgccgctgccagctctcgcactctgttcttccgccgctccgccgtcgcgtttctctgccggtcgcaatggaagaagagatcgccgcgctggtcattgacaatggctccggcatgtgcaaagctggttttgctggggacgacgctccccgagccgtgtttccttccatcgtcgggcgccccagacaccagggcgtcatggtgggcatgggccagaaggactcctacgtgggcgacgaggcccagagcaagcgtggcatcctgaccctgaagtaccccattgagcatggcatcgtcaccaactgggacgacatggagaagatctggcaccacaccttctacaacgagctgcgcgtggccccggaggagcacccagtgctgctgaccgaggcccccctgaaccccaaggccaacagagagaagatgactcagattatgtttgagaccttcaacaccccggccatgtacgtggccatccaggccgtgctgtccctctacgcctctgggcgcaccactggcattgtcatggactctggagacggggtcacccacacggtgcccatctacgagggctacgccctcccccacgccatcctgcgtctggacctggctggccgggacctgaccgactacctcatgaagatcctcactgagcgaggctacagcttcaccaccacggccgagcgggaaatcgtgcgcgacatcaaggagaagctgtgctacgtcgccctggacttcgagcaggagatggccaccgccgcatcctcctcttctctggagaagagctacgagctgcccgatggccaggtcatcaccattggcaatgagcggttccggtgtccggaggcgctgttccagccttccttcctgggtatggaatcttgcggcatccacgagaccaccttcaactccatcatgaagtgtgacgtggacatccgcaaagacctgtacgccaacacggtgctgtcgggcggcaccaccatgtacccgggcattgccgacaggatgcagaaggagatcaccgccctggcgcccagcaccatgaagatcaagatcatcgcacccccagagcgcaagtactcggtgtggatcggtggctccatcctggcctcactgtccaccttccagcagatgtggattagcaagcaggagtacgacgagtcgggcccctccatcgtccaccgcaaatgcttctaaacggactcagcagatgcgtagcatttgctgcatgggttaattgagaatagaaatttgcccctggcaaatgcacacacctcatgctagcctcacgaaactggaataagccttcgaaaagaaattgtccttgaagcttgtatctgatatcagcactggattgtagaacttgttgctgattttgaccttgtattgaagttaactgttccccttggtatttgtttaataccctgtacatatctttgagttcaacctttagtacgtgtggcttggtcacttcgtggctaaggtaagaacgtgcttgtggaagacaagtctgtggcttggtgagtctgtgtggccagcagcctctgatctgtgcagggtattaacgtgtcagggctgagtgttctgggatttctctagaggctggcaagaaccagttgttttgtcttgcgggtctgtcagggttggaaagtccaagccgtaggacccagtttcctttcttagctgatgtctttggccagaacaccgtgggctgttacttgctttgagttggaagcggtttgcatttacgcctgtaaatgtattcattcttaatttatgtaaggttttttttgtacgcaattctcgattctttgaagagatgacaacaaattttggttttctactgttatgtgagaacattaggccccagcaacacgtcattgtgtaaggaaaaataaaagtgctgccgtaaccgtctcagtcgccgctgccagctctcgcactctgttcttccgccgctccgccgtcgcgtttctctgccggtcgcaatggaagaagagatcgccgcgctggtcattgacaatggctccggcatgtgcaaagctggttttgctggggacgacgctccccgagccgtgtttccttccatcgtcgggcgccccagacaccagggcgtcatggtgggcatgggccagaaggactcctacgtgggcgacgaggcccagagcaagcgtggcatcctgaccctgaagtaccccattgagcatggcatcgtcaccaactgggacgacatggagaagatctggcaccacaccttctacaacgagctgcgcgtggccccggaggagcacccagtgctgctgaccgaggcccccctgaaccccaaggccaacagagagaagatgactcagattatgtttgagaccttcaacaccccggccatgtacgtggccatccaggccgtgctgtccctctacgcctctgggcgcaccactggcattgtcatggactctggagacggggtcacccacacggtgcccatctacgagggctacgccctcccccacgccatcctgcgtctggacctggctggccgggacctgaccgactacctcatgaagatcctcactgagcgaggctacagcttcaccaccacggccgagcgggaaatcgtgcgcgacatcaaggagaagctgtgctacgtcgccctggacttcgagcaggagatggccaccgccgcatcctcctcttctctggagaagagctacgagctgcccgatggccaggtcatcaccattggcaatgagcggttccggtgtccggaggcgctgttccagccttccttcctgggtatggaatcttgcggcatccacgagaccaccttcaactccatcatgaagtgtgacgtggacatccgcaaagacctgtacgccaacacggtgctgtcgggcggcaccaccatgtacccgggcattgccgacaggatgcagaaggagatcaccgccctggcgcccagcaccatgaagatcaagatcatcgcacccccagagcgcaagtactcggtgtggatcggtggctccatcctggcctcactgtccaccttccagcagatgtggattagcaagcaggagtacgacgagtcgggcccctccatcgtccaccgcaaatgcttctaaacggactcagcagatgcgtagcatttgctgcatgggttaattgagaatagaaatttgcccctggcaaatgcacacacctcatgctagcctcacgaaactggaataagccttcgaaaagaaattgtccttgaagcttgtatctgatatcagcactggattgtagaacttgttgctgattttgaccttgtattgaagttaactgttccccttggtatttgtttaataccctgtacatatctttgagttcaacctttagtacgtgtggcttggtcacttcgtggctaaggtaagaacgtgcttgtggaagacaagtctgtggcttggtgagtctgtgtggccagcagcctctgatctgtgcagggtattaacgtgtcagggctgagtgttctgggatttctctagaggctggcaagaaccagttgttttgtcttgcgggtctgtcagggttggaaagtccaagccgtaggacccagtttcctttcttagctgatgtctttggccagaacaccgtgggctgttacttgctttgagttggaagcggtttgcatttacgcctgtaaatgtattcattcttaatttatgtaaggttttttttgtacgcaattctcgattctttgaagagatgacaacaaattttggttttctactgttatgtgagaacattaggccccagcaacacgtcattgtgtaaggaaaaataaaagtgctgccgtaaccgtctcagtcgccgctgccagctctcgcactctgttcttccgccgctccgccgtcgcgtttctctgccggtcgcaatggaagaagagatcgccgcgctggtcattgacaatggctccggcatgtgcaaagctggttttgctggggacgacgctccccgagccgtgtttccttccatcgtcgggcgccccagacaccagggcgtcatggtgggcatgggccagaaggactcctacgtgggcgacgaggcccagagcaagcgtggcatcctgaccctgaagtaccccattgagcatggcatcgtcaccaactgggacgacatggagaagatctggcaccacaccttctacaacgagctgcgcgtggccccggaggagcacccagtgctgctgaccgaggcccccctgaaccccaaggccaacagagagaagatgactcagattatgtttgagaccttcaacaccccggccatgtacgtggccatccaggccgtgctgtccctctacgcctctgggcgcaccactggcattgtcatggactctggagacggggtcacccacacggtgcccatctacgagggctacgccctcccccacgccatcctgcgtctggacctggctggccgggacctgaccgactacctcatgaagatcctcactgagcgaggctacagcttcaccaccacggccgagcgggaaatcgtgcgcgacatcaaggagaagctgtgctacgtcgccctggacttcgagcaggagatggccaccgccgcatcctcctcttctctggagaagagctacgagctgcccgatggccaggtcatcaccattggcaatgagcggttccggtgtccggaggcgctgttccagccttccttcctgggtatggaatcttgcggcatccacgagaccaccttcaactccatcatgaagtgtgacgtggacatccgcaaagacctgtacgccaacacggtgctgtcgggcggcaccaccatgtacccgggcattgccgacaggatgcagaaggagatcaccgccctggcgcccagcaccatgaagatcaagatcatcgcacccccagagcgcaagtactcggtgtggatcggtggctccatcctggcctcactgtccaccttccagcagatgtggattagcaagcaggagtacgacgagtcgggcccctccatcgtccaccgcaaatgcttctaaacggactcagcagatgcgtagcatttgctgcatgggttaattgagaatagaaatttgcccctggcaaatgcacacacctcatgctagcctcacgaaactggaataagccttcgaaaagaaattgtccttgaagcttgtatctgatatcagcactggattgtagaacttgttgctgattttgaccttgtattgaagttaactgttccccttggtatttgtttaataccctgtacatatctttgagttcaacctttagtacgtgtggcttggtcacttcgtggctaaggtaagaacgtgcttgtggaagacaagtctgtggcttggtgagtctgtgtggccagcagcctctgatctgtgcagggtattaacgtgtcagggctgagtgttctgggatttctctagaggctggcaagaaccagttgttttgtcttgcgggtctgtcagggttggaaagtccaagccgtaggacccagtttcctttcttagctgatgtctttggccagaacaccgtgggctgttacttgctttgagttggaagcggtttgcatttacgcctgtaaatgtattcattcttaatttatgtaaggttttttttgtacgcaattctcgattctttgaagagatgacaacaaattttggttttctactgttatgtgagaacattaggccccagcaacacgtcattgtgtaaggaaaaataaaagtgctgccgtaaccgtctcagtcgccgctgccagctctcgcactctgttcttccgccgctccgccgtcgcgtttctctgccggtcgcaatggaagaagagatcgccgcgctggtcattgacaatggctccggcatgtgcaaagctggttttgctggggacgacgctccccgagccgtgtttccttccatcgtcgggcgccccagacaccagggcgtcatggtgggcatgggccagaaggactcctacgtgggcgacgaggcccagagcaagcgtggcatcctgaccctgaagtaccccattgagcatggcatcgtcaccaactgggacgacatggagaagatctggcaccacaccttctacaacgagctgcgcgtggccccggaggagcacccagtgctgctgaccgaggcccccctgaaccccaaggccaacagagagaagatgactcagattatgtttgagaccttcaacaccccggccatgtacgtggccatccaggccgtgctgtccctctacgcctctgggcgcaccactggcattgtcatggactctggagacggggtcacccacacggtgcccatctacgagggctacgccctcccccacgccatcctgcgtctggacctggctggccgggacctgaccgactacctcatgaagatcctcactgagcgaggctacagcttcaccaccacggccgagcgggaaatcgtgcgcgacatcaaggagaagctgtgctacgtcgccctggacttcgagcaggagatggccaccgccgcatcctcctcttctctggagaagagctacgagctgcccgatggccaggtcatcaccattggcaatgagcggttccggtgtccggaggcgctgttccagccttccttcctgggtatggaatcttgcggcatccacgagaccaccttcaactccatcatgaagtgtgacgtggacatccgcaaagacctgtacgccaacacggtgctgtcgggcggcaccaccatgtacccgggcattgccgacaggatgcagaaggagatcaccgccctggcgcccagcaccatgaagatcaagatcatcgcacccccagagcgcaagtactcggtgtggatcggtggctccatcctggcctcactgtccaccttccagcagatgtggattagcaagcaggagtacgacgagtcgggcccctccatcgtccaccgcaaatgcttctaaacggactcagcagatgcgtagcatttgctgcatgggttaattgagaatagaaatttgcccctggcaaatgcacacacctcatgctagcctcacgaaactggaataagccttcgaaaagaaattgtccttgaagcttgtatctgatatcagcactggattgtagaacttgttgctgattttgaccttgtattgaagttaactgttccccttggtatttgtttaataccctgtacatatctttgagttcaacctttagtacgtgtggcttggtcacttcgtggctaaggtaagaacgtgcttgtggaagacaagtctgtggcttggtgagtctgtgtggccagcagcctctgatctgtgcagggtattaacgtgtcagggctgagtgttctgggatttctctagaggctggcaagaaccagttgttttgtcttgcgggtctgtcagggttggaaagtccaagccgtaggacccagtttcctttcttagctgatgtctttggccagaacaccgtgggctgttacttgctttgagttggaagcggtttgcatttacgcctgtaaatgtattcattcttaatttatgtaaggttttttttgtacgcaattctcgattctttgaagagatgacaacaaattttggttttctactgttatgtgagaacattaggccccagcaacacgtcattgtgtaaggaaaaataaaagtgctgccgtaaccgtctcagtcgccgctgccagctctcgcactctgttcttccgccgctccgccgtcgcgtttctctgccggtcgcaatggaagaagagatcgccgcgctggtcattgacaatggctccggcatgtgcaaagctggttttgctggggacgacgctccccgagccgtgtttccttccatcgtcgggcgccccagacaccagggcgtcatggtgggcatgggccagaaggactcctacgtgggcgacgaggcccagagcaagcgtggcatcctgaccctgaagtaccccattgagcatggcatcgtcaccaactgggacgacatggagaagatctggcaccacaccttctacaacgagctgcgcgtggccccggaggagcacccagtgctgctgaccgaggcccccctgaaccccaaggccaacagagagaagatgactcagattatgtttgagaccttcaacaccccggccatgtacgtggccatccaggccgtgctgtccctctacgcctctgggcgcaccactggcattgtcatggactctggagacggggtcacccacacggtgcccatctacgagggctacgccctcccccacgccatcctgcgtctggacctggctggccgggacctgaccgactacctcatgaagatcctcactgagcgaggctacagcttcaccaccacggccgagcgggaaatcgtgcgcgacatcaaggagaagctgtgctacgtcgccctggacttcgagcaggagatggccaccgccgcatcctcctcttctctggagaagagctacgagctgcccgatggccaggtcatcaccattggcaatgagcggttccggtgtccggaggcgctgttccagccttccttcctgggtatggaatcttgcggcatccacgagaccaccttcaactccatcatgaagtgtgacgtggacatccgcaaagacctgtacgccaacacggtgctgtcgggcggcaccaccatgtacccgggcattgccgacaggatgcagaaggagatcaccgccctggcgcccagcaccatgaagatcaagatcatcgcacccccagagcgcaagtactcggtgtggatcggtggctccatcctggcctcactgtccaccttccagcagatgtggattagcaagcaggagtacgacgagtcgggcccctccatcgtccaccgcaaatgcttctaaacggactcagcagatgcgtagcatttgctgcatgggttaattgagaatagaaatttgcccctggcaaatgcacacacctcatgctagcctcacgaaactggaataagccttcgaaaagaaattgtccttgaagcttgtatctgatatcagcactggattgtagaacttgttgctgattttgaccttgtattgaagttaactgttccccttggtatttgtttaataccctgtacatatctttgagttcaacctttagtacgtgtggcttggtcacttcgtggctaaggtaagaacgtgcttgtggaagacaagtctgtggcttggtgagtctgtgtggccagcagcctctgatctgtgcagggtattaacgtgtcagggctgagtgttctgggatttctctagaggctggcaagaaccagttgttttgtcttgcgggtctgtcagggttggaaagtccaagccgtaggacccagtttcctttcttagctgatgtctttggccagaacaccgtgggctgttacttgctttgagttggaagcggtttgcatttacgcctgtaaatgtattcattcttaatttatgtaaggttttttttgtacgcaattctcgattctttgaagagatgacaacaaattttggttttctactgttatgtgagaacattaggccccagcaacacgtcattgtgtaaggaaaaataaaagtgctgccgtaaccgtctcagtcgccgctgccagctctcgcactctgttcttccgccgctccgccgtcgcgtttctctgccggtcgcaatggaagaagagatcgccgcgctggtcattgacaatggctccggcatgtgcaaagctggttttgctggggacgacgctccccgagccgtgtttccttccatcgtcgggcgccccagacaccagggcgtcatggtgggcatgggccagaaggactcctacgtgggcgacgaggcccagagcaagcgtggcatcctgaccctgaagtaccccattgagcatggcatcgtcaccaactgggacgacatggagaagatctggcaccacaccttctacaacgagctgcgcgtggccccggaggagcacccagtgctgctgaccgaggcccccctgaaccccaaggccaacagagagaagatgactcagattatgtttgagaccttcaacaccccggccatgtacgtggccatccaggccgtgctgtccctctacgcctctgggcgcaccactggcattgtcatggactctggagacggggtcacccacacggtgcccatctacgagggctacgccctcccccacgccatcctgcgtctggacctggctggccgggacctgaccgactacctcatgaagatcctcactgagcgaggctacagcttcaccaccacggccgagcgggaaatcgtgcgcgacatcaaggagaagctgtgctacgtcgccctggacttcgagcaggagatggccaccgccgcatcctcctcttctctggagaagagctacgagctgcccgatggccaggtcatcaccattggcaatgagcggttccggtgtccggaggcgctgttccagccttccttcctgggtatggaatcttgcggcatccacgagaccaccttcaactccatcatgaagtgtgacgtggacatccgcaaagacctgtacgccaacacggtgctgtcgggcggcaccaccatgtacccgggcattgccgacaggatgcagaaggagatcaccgccctggcgcccagcaccatgaagatcaagatcatcgcacccccagagcgcaagtactcggtgtggatcggtggctccatcctggcctcactgtccaccttccagcagatgtggattagcaagcaggagtacgacgagtcgggcccctccatcgtccaccgcaaatgcttctaaacggactcagcagatgcgtagcatttgctgcatgggttaattgagaatagaaatttgcccctggcaaatgcacacacctcatgctagcctcacgaaactggaataagccttcgaaaagaaattgtccttgaagcttgtatctgatatcagcactggattgtagaacttgttgctgattttgaccttgtattgaagttaactgttccccttggtatttgtttaataccctgtacatatctttgagttcaacctttagtacgtgtggcttggtcacttcgtggctaaggtaagaacgtgcttgtggaagacaagtctgtggcttggtgagtctgtgtggccagcagcctctgatctgtgcagggtattaacgtgtcagggctgagtgttctgggatttctctagaggctggcaagaaccagttgttttgtcttgcgggtctgtcagggttggaaagtccaagccgtaggacccagtttcctttcttagctgatgtctttggccagaacaccgtgggctgttacttgctttgagttggaagcggtttgcatttacgcctgtaaatgtattcattcttaatttatgtaaggttttttttgtacgcaattctcgattctttgaagagatgacaacaaattttggttttctactgttatgtgagaacattaggccccagcaacacgtcattgtgtaaggaaaaataaaagtgctgccgtaaccgtctcagtcgccgctgccagctctcgcactctgttcttccgccgctccgccgtcgcgtttctctgccggtcgcaatggaagaagagatcgccgcgctggtcattgacaatggctccggcatgtgcaaagctggttttgctggggacgacgctccccgagccgtgtttccttccatcgtcgggcgccccagacaccagggcgtcatggtgggcatgggccagaaggactcctacgtgggcgacgaggcccagagcaagcgtggcatcctgaccctgaagtaccccattgagcatggcatcgtcaccaactgggacgacatggagaagatctggcaccacaccttctacaacgagctgcgcgtggccccggaggagcacccagtgctgctgaccgaggcccccctgaaccccaaggccaacagagagaagatgactcagattatgtttgagaccttcaacaccccggccatgtacgtggccatccaggccgtgctgtccctctacgcctctgggcgcaccactggcattgtcatggactctggagacggggtcacccacacggtgcccatctacgagggctacgccctcccccacgccatcctgcgtctggacctggctggccgggacctgaccgactacctcatgaagatcctcactgagcgaggctacagcttcaccaccacggccgagcgggaaatcgtgcgcgacatcaaggagaagctgtgctacgtcgccctggacttcgagcaggagatggccaccgccgcatcctcctcttctctggagaagagctacgagctgcccgatggccaggtcatcaccattggcaatgagcggttccggtgtccggaggcgctgttccagccttccttcctgggtatggaatcttgcggcatccacgagaccaccttcaactccatcatgaagtgtgacgtggacatccgcaaagacctgtacgccaacacggtgctgtcgggcggcaccaccatgtacccgggcattgccgacaggatgcagaaggagatcaccgccctggcgcccagcaccatgaagatcaagatcatcgcacccccagagcgcaagtactcggtgtggatcggtggctccatcctggcctcactgtccaccttccagcagatgtggattagcaagcaggagtacgacgagtcgggcccctccatcgtccaccgcaaatgcttctaaacggactcagcagatgcgtagcatttgctgcatgggttaattgagaatagaaatttgcccctggcaaatgcacacacctcatgctagcctcacgaaactggaataagccttcgaaaagaaattgtccttgaagcttgtatctgatatcagcactggattgtagaacttgttgctgattttgaccttgtattgaagttaactgttccccttggtatttgtttaataccctgtacatatctttgagttcaacctttagtacgtgtggcttggtcacttcgtggctaaggtaagaacgtgcttgtggaagacaagtctgtggcttggtgagtctgtgtggccagcagcctctgatctgtgcagggtattaacgtgtcagggctgagtgttctgggatttctctagaggctggcaagaaccagttgttttgtcttgcgggtctgtcagggttggaaagtccaagccgtaggacccagtttcctttcttagctgatgtctttggccagaacaccgtgggctgttacttgctttgagttggaagcggtttgcatttacgcctgtaaatgtattcattcttaatttatgtaaggttttttttgtacgcaattctcgattctttgaagagatgacaacaaattttggttttctactgttatgtgagaacattaggccccagcaacacgtcattgtgtaaggaaaaataaaagtgctgccgtaaccgtctcagtcgccgctgccagctctcgcactctgttcttccgccgctccgccgtcgcgtttctctgccggtcgcaatggaagaagagatcgccgcgctggtcattgacaatggctccggcatgtgcaaagctggttttgctggggacgacgctccccgagccgtgtttccttccatcgtcgggcgccccagacaccagggcgtcatggtgggcatgggccagaaggactcctacgtgggcgacgaggcccagagcaagcgtggcatcctgaccctgaagtaccccattgagcatggcatcgtcaccaactgggacgacatggagaagatctggcaccacaccttctacaacgagctgcgcgtggccccggaggagcacccagtgctgctgaccgaggcccccctgaaccccaaggccaacagagagaagatgactcagattatgtttgagaccttcaacaccccggccatgtacgtggccatccaggccgtgctgtccctctacgcctctgggcgcaccactggcattgtcatggactctggagacggggtcacccacacggtgcccatctacgagggctacgccctcccccacgccatcctgcgtctggacctggctggccgggacctgaccgactacctcatgaagatcctcactgagcgaggctacagcttcaccaccacggccgagcgggaaatcgtgcgcgacatcaaggagaagctgtgctacgtcgccctggacttcgagcaggagatggccaccgccgcatcctcctcttctctggagaagagctacgagctgcccgatggccaggtcatcaccattggcaatgagcggttccggtgtccggaggcgctgttccagccttccttcctgggtatggaatcttgcggcatccacgagaccaccttcaactccatcatgaagtgtgacgtggacatccgcaaagacctgtacgccaacacggtgctgtcgggcggcaccaccatgtacccgggcattgccgacaggatgcagaaggagatcaccgccctggcgcccagcaccatgaagatcaagatcatcgcacccccagagcgcaagtactcggtgtggatcggtggctccatcctggcctcactgtccaccttccagcagatgtggattagcaagcaggagtacgacgagtcgggcccctccatcgtccaccgcaaatgcttctaaacggactcagcagatgcgtagcatttgctgcatgggttaattgagaatagaaatttgcccctggcaaatgcacacacctcatgctagcctcacgaaactggaataagccttcgaaaagaaattgtccttgaagcttgtatctgatatcagcactggattgtagaacttgttgctgattttgaccttgtattgaagttaactgttccccttggtatttgtttaataccctgtacatatctttgagttcaacctttagtacgtgtggcttggtcacttcgtggctaaggtaagaacgtgcttgtggaagacaagtctgtggcttggtgagtctgtgtggccagcagcctctgatctgtgcagggtattaacgtgtcagggctgagtgttctgggatttctctagaggctggcaagaaccagttgttttgtcttgcgggtctgtcagggttggaaagtccaagccgtaggacccagtttcctttcttagctgatgtctttggccagaacaccgtgggctgttacttgctttgagttggaagcggtttgcatttacgcctgtaaatgtattcattcttaatttatgtaaggttttttttgtacgcaattctcgattctttgaagagatgacaacaaattttggttttctactgttatgtgagaacattaggccccagcaacacgtcattgtgtaaggaaaaataaaagtgctgccgtaaccgtctcagtcgccgctgccagctctcgcactctgttcttccgccgctccgccgtcgcgtttctctgccggtcgcaatggaagaagagatcgccgcgctggtcattgacaatggctccggcatgtgcaaagctggttttgctggggacgacgctccccgagccgtgtttccttccatcgtcgggcgccccagacaccagggcgtcatggtgggcatgggccagaaggactcctacgtgggcgacgaggcccagagcaagcgtggcatcctgaccctgaagtaccccattgagcatggcatcgtcaccaactgggacgacatggagaagatctggcaccacaccttctacaacgagctgcgcgtggccccggaggagcacccagtgctgctgaccgaggcccccctgaaccccaaggccaacagagagaagatgactcagattatgtttgagaccttcaacaccccggccatgtacgtggccatccaggccgtgctgtccctctacgcctctgggcgcaccactggcattgtcatggactctggagacggggtcacccacacggtgcccatctacgagggctacgccctcccccacgccatcctgcgtctggacctggctggccgggacctgaccgactacctcatgaagatcctcactgagcgaggctacagcttcaccaccacggccgagcgggaaatcgtgcgcgacatcaaggagaagctgtgctacgtcgccctggacttcgagcaggagatggccaccgccgcatcctcctcttctctggagaagagctacgagctgcccgatggccaggtcatcaccattggcaatgagcggttccggtgtccggaggcgctgttccagccttccttcctgggtatggaatcttgcggcatccacgagaccaccttcaactccatcatgaagtgtgacgtggacatccgcaaagacctgtacgccaacacggtgctgtcgggcggcaccaccatgtacccgggcattgccgacaggatgcagaaggagatcaccgccctggcgcccagcaccatgaagatcaagatcatcgcacccccagagcgcaagtactcggtgtggatcggtggctccatcctggcctcactgtccaccttccagcagatgtggattagcaagcaggagtacgacgagtcgggcccctccatcgtccaccgcaaatgcttctaaacggactcagcagatgcgtagcatttgctgcatgggttaattgagaatagaaatttgcccctggcaaatgcacacacctcatgctagcctcacgaaactggaataagccttcgaaaagaaattgtccttgaagcttgtatctgatatcagcactggattgtagaacttgttgctgattttgaccttgtattgaagttaactgttccccttggtatttgtttaataccctgtacatatctttgagttcaacctttagtacgtgtggcttggtcacttcgtggctaaggtaagaacgtgcttgtggaagacaagtctgtggcttggtgagtctgtgtggccagcagcctctgatctgtgcagggtattaacgtgtcagggctgagtgttctgggatttctctagaggctggcaagaaccagttgttttgtcttgcgggtctgtcagggttggaaagtccaagccgtaggacccagtttcctttcttagctgatgtctttggccagaacaccgtgggctgttacttgctttgagttggaagcggtttgcatttacgcctgtaaatgtattcattcttaatttatgtaaggttttttttgtacgcaattctcgattctttgaagagatgacaacaaattttggttttctactgttatgtgagaacattaggccccagcaacacgtcattgtgtaaggaaaaataaaagtgctgccgtaaccgtctcagtcgccgctgccagctctcgcactctgttcttccgccgctccgccgtcgcgtttctctgccggtcgcaatggaagaagagatcgccgcgctggtcattgacaatggctccggcatgtgcaaagctggttttgctggggacgacgctccccgagccgtgtttccttccatcgtcgggcgccccagacaccagggcgtcatggtgggcatgggccagaaggactcctacgtgggcgacgaggcccagagcaagcgtggcatcctgaccctgaagtaccccattgagcatggcatcgtcaccaactgggacgacatggagaagatctggcaccacaccttctacaacgagctgcgcgtggccccggaggagcacccagtgctgctgaccgaggcccccctgaaccccaaggccaacagagagaagatgactcagattatgtttgagaccttcaacaccccggccatgtacgtggccatccaggccgtgctgtccctctacgcctctgggcgcaccactggcattgtcatggactctggagacggggtcacccacacggtgcccatctacgagggctacgccctcccccacgccatcctgcgtctggacctggctggccgggacctgaccgactacctcatgaagatcctcactgagcgaggctacagcttcaccaccacggccgagcgggaaatcgtgcgcgacatcaaggagaagctgtgctacgtcgccctggacttcgagcaggagatggccaccgccgcatcctcctcttctctggagaagagctacgagctgcccgatggccaggtcatcaccattggcaatgagcggttccggtgtccggaggcgctgttccagccttccttcctgggtatggaatcttgcggcatccacgagaccaccttcaactccatcatgaagtgtgacgtggacatccgcaaagacctgtacgccaacacggtgctgtcgggcggcaccaccatgtacccgggcattgccgacaggatgcagaaggagatcaccgccctggcgcccagcaccatgaagatcaagatcatcgcacccccagagcgcaagtactcggtgtggatcggtggctccatcctggcctcactgtccaccttccagcagatgtggattagcaagcaggagtacgacgagtcgggcccctccatcgtccaccgcaaatgcttctaaacggactcagcagatgcgtagcatttgctgcatgggttaattgagaatagaaatttgcccctggcaaatgcacacacctcatgctagcctcacgaaactggaataagccttcgaaaagaaattgtccttgaagcttgtatctgatatcagcactggattgtagaacttgttgctgattttgaccttgtattgaagttaactgttccccttggtatttgtttaataccctgtacatatctttgagttcaacctttagtacgtgtggcttggtcacttcgtggctaaggtaagaacgtgcttgtggaagacaagtctgtggcttggtgagtctgtgtggccagcagcctctgatctgtgcagggtattaacgtgtcagggctgagtgttctgggatttctctagaggctggcaagaaccagttgttttgtcttgcgggtctgtcagggttggaaagtccaagccgtaggacccagtttcctttcttagctgatgtctttggccagaacaccgtgggctgttacttgctttgagttggaagcggtttgcatttacgcctgtaaatgtattcattcttaatttatgtaaggttttttttgtacgcaattctcgattctttgaagagatgacaacaaattttggttttctactgttatgtgagaacattaggccccagcaacacgtcattgtgtaaggaaaaataaaagtgctgccgtaacc

SEQ ID NO: 912 - DNA, 4806 bp, Homo sapiens
  misc_feature (503)..(503): second gene starts at position 503
atggtgttcaggcgcttcgtggaggttggccgggtggcctatgtctcctttggacctcatgccggaaaattggtcgcgattgtagatgttattgatcagaacagggctttggtcgatggaccttgcactcaagtgaggagacaggccatgcctttcaagtgcatgcagctcactgatttcatcctcaagtttccgcacagtgcccaccagaagtatgtccgacaagcctggcagaaggcagacatcaatacaaaatgggcagccacacgatgggccaagaagattgaagccagagaaaggaaagccaagatgacagattttgatcgttttaaagttatgaaggcaaagaaaatgaggaacagaataatcaagaatgaagttaagaagcttcaaaaggcagctctcctgaaagcttctcccaaaaaagcacctggtactaagggtactgctgctgctgctgctgctgctgctgctgctaaagttccagcaaaaaagatcaccgtcgcggcaatcctagcgcgcagcagcagcagcagcagcagcagcagcagcagcagcagcagcagcacccgcatccgctgcgggagtccgagccggaaccacacccaagtagctgccctttcctcttctgtcatctcaccgccccaccacagaccgcgttccccgaggaaaccggccgcccacgcccggagcatcctcccctgttgagcgggcgctgacggacccggcggcatgatgcggctgcgaggctcggggatgctgcgggacctgctcctgcggtcgcccgccggcgtgagcgcgactctgcggcgggcacagcccttggtcaccctgtgccggcgtccccgaggcgggggacggccggccgcgggcccggctgccgccgcgcgactccacccgtggtggggcgggggcggctggccggcggagcccctcgcgcggggcctgtccagctctccttcggagatcttgcaggagctgggcaaggggagcacgcatccgcagcccggggtgtcgccacccgctgccccggcggcgcccggccccaaggacggccccggggagacggacgcgtttggcaacagcgagggcaaagagctggtggcctcaggtgaaaataaaataaaacagggtctgttacctagcttggaagatttgctgttctatacaattgctgaaggacaagagaaaatacctgttcataaatttattacagcactcaaatctacaggattgcgaacgtctgatcccaggttgaaagagtgtatggatatgttaagattaactcttcaaacaacatcagatggtgtcatgctagacaaagatctttttaaaaaatgtgttcagagcaacattgttttgttgacacaagcatttagaagaaagtttgtgattcctgactttatgtcttttacctcacacattgatgagttatatgaaagtgctaaaaagcagtctggaggaaaggttgcagattatattcctcaactggccaaattcagtcccgatttgtggggtgtgtctgtttgtacagtagatggacagaggcattctactggagataccaaagttcccttctgtcttcagtcctgtgtaaaacctttgaaatatgccattgctgttaatgatcttggaactgaatatgtgcatcgatatgttggaaaagagccgagtggactaagattcaacaaactatttttgaatgaagatgataaaccacataatcctatggtaaatgctggagcaattgttgtgacttcactaataaagcaaggagtaaataatgctgaaaaatttgactatgtcatgcagtttttgaataagatggctggtaatgaatatgttggattcagtaatgcaacgtttcagtctgaaagagaaagtggagatcgaaattttgcaataggatattacttaaaagaaaagaagtgttttccagaaggcacagacatggttggtatattagacttctacttccagctgtgctccattgaagtgacttgtgaatcagccagtgtgatggctgcgacactggctaatggtggtttctgcccaattactggtgaaagagtactgagccctgaagcagttcgaaatacattgagtttgatgcattcctgtggcatgtatgacttctcagggcagtttgctttccatgttggtcttcctgcaaaatctggagttgctgggggcattcttttagttgtccccaatgttatgggtatgatgtgctggtctcctcctctggataagatgggcaacagtgttaagggaattcacttttgtcacgatcttgtttctctgtgtaatttccataactatgataatttgagacactttgcaaaaaaacttgatcctcgaagagaaggtggtgatcaaagggtaaagtcagtgataaatcttttgtttgctgcatatactggagatgtgtctgcacttcgaagatttgctttgtcagctatggacatggaacagcgggactatgattctagaacagcactccatgtagctgctgcagagggtcatgttgaagttgttaaatttttgctggaagcctgcaaagtaaaccctttccccaaggacaggtggaataacactcccatggatgaagcactgcactttggacaccatgatgtatttaaaattctccaagaataccaagtccagtacacacctcaaggagattctgacaacgggaaggaaaatcaaaccgtccataagaatcttgatggattgttgtaatggtctcaaatcccaagatttaaatcacttacctatttaattgtggaaaatgattatgaagaacatgtgtatttctatctggtagtgatgtatattttacatttgtcatttcagtgttactggagttttcttcattgtgcacacaggacaaatctgatctctttgggaaaaaatagaaataaaacaatctccctccataatgtgagcaatattacctcgtgcattgtataatttgatgtaaaagaaatagttaccaatgctagcttgtgtggtcttccatgatttatttgtgttttgtgaattttcaatttatggtgatgatctgctgatatgcatttataaagtaagctctgttgtacagtctgtccaaatgggtcaaggttgcctttagaagcaaatagtgtgattttcaagacttcaaatacaaatttagtttaagtgtttgaacaactatatgcacttacggttgtgtgtttaaaatgtctctctcaccccctagcttcatgatgtgactcttaaaaaactataatagttaacaactgttagtaagatagaccaattctgattagactttatcagggaatctgtttaagatatgtttggtgaccaaaacgtatgtgtgaatgtagttataatgcttttgaaaaattttcctttttctatatccccttagtccagcctctcttctcagacatttagctatctgcctctttcctttagctgggaaagtgagagctggcatactatgcagtttttatgttttccatagtaagtcagaaaatgcctcctatttctggcatcagaactttgccatttgtctacagaagacgaaccagagacaaaattactaagtataaattagtcaagtttatcagtctaaaaaacgaagggatgtgcaactgcagctctttaagaagttttttttttttagcttctagggtaaagataaattcagaaatgctctaagctaccaaagttattctgaaagtatgggaactgctacaactaacaaacatttgtttccaagcctgtcattaagagtctgcatcaagagatttgtcctccttgggggaccactggatcattccagatttcttgtgatttttctattgtgtaattcttggtgggctctgtagtttaataataagaaaaaggccatttcattttaaattgtgacctataattctttgtcttgggttggtaattcaggattcatttggaaagtgggtaaaaggggcttcaaaaaacggatagaacaggattttctaggagttacacatacattttatcctgtcatacctcgagataaagtggcatgttagtgaggagttctgatattaagcacacacacacatgcacacaaatggacttctctgaagctgtgtttagtgaaatgagctcaagtacatgaatgttagttgttatcacatacagcaaattcctttttttttctttttctatgagcacactctgctgcttctaaactttacatgcctgatggcaccttactccagcagcctccaggtgctttcattttcacttccagtctaagccagtggctcctgccactgccctcccattacctagatggcacctcctttggtgaaaccacggccaatgttccttagctgcaccaggcccgaagctgttcccatgcttgagcttccatggggaggatgctgagtgagcagtttcctaccccgtggatctagcaagccatggagacaggtagcatttgtaagatgctgcacaggagcagcattatccccaaagatattacagggtagacacgttttaactgaaatcaatcaagataactttattcaaagagcagcccgctttgtgtgactaaaatgaaacaagacagttgaattgtgtgacttgaagattaccaatgattttgaggcttttctataataaaaagaggttctaaccattatttgggaacaaagagagttttcatcttttttcagatcaaaaccattctgtaaaatctttgttgtttaattaaatgtgccgttatttacccctgatgttatttatgactatgtgccgattcctgct

SEQ ID NO: 913 - DNA, 4806 bp, Homo sapiens; identical to SEQ ID NO: 912
  misc_feature (503)..(503): second gene starts at position 503

SEQ ID NO: 914 - DNA, 4631 bp, Homo sapiens
  misc_feature (16)..(16): second gene starts at position 16
atgccgaagagaaaggttgcataccctgtcctgagggcgcggcacggagtgcatgcgggccgctgccatgacgaccgccatcttggagcgcctgagcaccctgtcggtcagcgggcagcagctgcgccgcctgcccaagatcctggaggatgggcttcccaagatgccttgcactgtcccagaaacggatgtgccccagctcttccgggagccttacatccgcaccggctaccgccccacggggcacgagtggcgctactacttcttcagcctctttcagaaacacaacgaggtggtcaacgtctggacccatttactggcagccctggccgtcctcttgcgattctgggcctttgccgaggctgaggccttgccatgggcgtctacccactccctgcctctgctcctcttcatcctgtcgtcaatcacttacctcacctgcagccttctggcccacctgctgcagtccaagtcagagctctcccactacaccttctactttgtggactatgttggcgtgagcgtttaccaatatggcagtgctttggctcatttcttctacagctctgaccaggcctggtatgaccggttctggcttttcttcttgccagcagctgccttctgtggctggttatcttgtgctggctgttgctatgccaaatatcgttaccggaggccttatccagtcatgaggaagatctgtcaagtggtgccagcaggtctggcttttatcctagacatcagccctgtggcacaccgtgtggcgctctgtcacctggctggctgccaggagcaagcagcctggtaccacaccctccagatcctcttcttcctggttagcgcttatttcttctcctgccccgtgcctgagaagtacttcccgggttcctgtgacatcgtgggccatgggcatcagatcttccatgcatttctgtccatctgtacgctctcccagctggaggccatcctcctggactaccaggggcggcaggagatcttcctgcagcgccatggacccctatctgtccacatggcctgcctctccttcttcttcctggctgcctgcagtgctgccaccgcagcccttctgaggcacaaagtcaaggccagactgaccaagaaagattcctgaggctggcaagtggggcaacgtgtggaggaagcccctcataatttggagaaaacttgatacaatagaagctgacttttaaggcattggcttttaaattaatacatatatccaaggatatgttatagctgcagtgtttgaaagccaaaggatttaagagttttgttgttgttaataaaaggaatactccttttccttttggatcatagcttaacaaggcacaggaagggaagggatcttgactaagattcatgagacattgaattaaggagaatcatcttcatgcctgaaaatttagcaaaattccgactatggcctccaggggcaattcctaaaagctgaatggataataaaattggactggaaagtaagtaggtggctggtcctcaccctgttggaatggctatcctactatgctgttctttggtaatggaataaattgacccaaggaccgaatttcatttggatttcaaattgtccagagtggaaaagccttcaagatgacatgatgaattactcagttcatctgatttctggtccctcctttctcgacaactataatactaacccttttctcaggataactgtctacacctggcagttttctctgacgtgctgttcactcacatccctaccttgcatggtaatataaaggactaggaagcagtcatacttccaggaaatgcttggattcatgtggacattcaggaagcttattctcatataatactaatctaaacagtactagaaattacagtgccaagagccaccaggaggcccagccaataagcatagatactatatggtatcatgggacccatctattttttaccagtggactacaggattacttgagagttatcagggctgcctaacagaccaggagatctgggggttgcaccagggaatcgccatatttgaccagcatgttttaaaagctcttggtaggattagttggttctaaggatccctctagggacctcattatttcaagaggaacccaaagtccagcctcctacatagatgctgccccacgaaggacccacaaaactaacctagttcagggttctcaggcaggcagttctgcttcagcttagagcagaacccataaaatactcaagtactgggataggcaagcatgtgtgtttactgtggattggtccctgaaggctcctttgggtgagaacatgtgaaccaggcaccctggtttgtttggagcattgctgcccagaagcttctatgggataggtggtgcttgggattgatgtgttgtggccatgcagccctccctgaggattgacttctgcactaatccagtgaaggaggctgtgtcaaaagaagggctcagaagccctcttttcagaggcaatgattcctgtcagtatgaggtcccttagttactaaaaagggacatgatttaactccagtttgatgaacctcctccgagtttactttattgtcttcaaatcttttgttttcttcctttttgtgagatttgtgggttttgtgccttataaatggaaatgtatgaacacaatatatgctcatgtagaattttctgttctgggttattgggataagaaaaaatatatattgctcttcaactagtgaatgaaagaaacttcagaaagctagaattgcttatcaatcaaaagactttctcaatctattttggccacaaacaaacatattcaactgaagctttccaataatctttatatcaagaaagcatgcgtcttgtcagctacattgttttcttagatggatttctcctgttaatcctcaaatatctgaacttctgtgttacccaagtgtcttatacaagcttctggtgtctaggacaaatttatggcaaataaaattagcaaaactgaactgggttgaactgaacaagaggatgggggaattgtgcaaatacgttgttagtagaaggtcaatttaaaatagggactagaaattatttgaagttttctttattacggattcaaagacttattttgaaagttggaaggagaagggagggaagagagcagaagggaagaaggtgtaagtcaagctcttgaatataactggtggtattgtgggcagagatctttagttcaaatccacgtattttttaaaagagagaaccggaggtagagcaatgatcagatgggtgcacagaccagtgccaatctgaacattgttaatggcctgtgacatgatgagcacaggaacaggcatgaagatattgccatacaattttaatttatacaagtattggcccctcaagtggttggaaattttttttttaatctctttttctgagacagggtcttactctgtcgcccaggctggagtgcagtgatgcaatcacggctcactgcagcctcgacctccccagctcaagcaatcctcccacctcagcctcctaagtacctggtactacaggcgcgtgccaccacacctggctaatttttgcattttttgtagagacagggttttgccacgttgcttaggctggtcttgaactcctgaactcaagtgatccgcccacctcagcctcccaaagtgttgggattacagacattagccatcacgcctgccctagaaacagttttttaataggagatatttgagaggcattgaggtaggagactctatgacatgccctcagaatatcagaatcttcttagaaataaactaggaaatgcagatgtttttaactactcagacttttgaggaattaatccttttaaaacatttttgttaaagttagtgtatcagtaagaaacagacctagtttaaaaggaataatcaacaattttataaaggagatggcttattcaaccatagcccctccaacatatctactggaaattctgctggttaactttatctctctctctcttaatttagactttcaacctatgaaaatgtaaatacctttgaaaaaactaaactatcagtcatttacatcctctcatgaatgaaatgcagtgtagggagaggagatggcaggacacagcaaacaggacacatttgcctgcttctctcttgcctaattcttcctgacctgtatttactgatgcttaataatacttgtaagactctaggggttcatttcccatttcagcggaaagtacttcactcaacaacaatattctcaagagtcttctactggaagctagaaagaaataggaatttaagtccatagaatgaaggtagttattcctgcctgtgttgcccacctgttcacaaaaagtacctttatgcttgaaaacattaggttctttggttactgcactgtagtttcaaatggatcctccagatggcattcatgtcttactcagaaagggcactgccattgtccccaaggcttctgtctactaattctattggtcttgtgttttgcttgcttggcaaaaaaaaaaaaaaaaaaaaaaaaaaaaaaaatggagctattttctgtctatataaatctacttatatgaataaccattaaagtgattttgtatatgca

SEQ ID NO: 915 - DNA, 4631 bp, Homo sapiens; identical to SEQ ID NO: 914
  misc_feature (16)..(16): second gene starts at position 16

SEQ ID NO: 916 - DNA, 4459 bp, Homo sapiens
  misc_feature (470)..(470): second gene starts at position 470
atggtgttcaggcgcttcgtggaggttggccgggtggcctatgtctcctttggacctcatgccggaaaattggtcgcgattgtagatgttattgatcagaacagggctttggtcgatggaccttgcactcaagtgaggagacaggccatgcctttcaagtgcatgcagctcactgatttcatcctcaagtttccgcacagtgcccaccagaagtatgtccgacaagcctggcagaaggcagacatcaatacaaaatgggcagccacacgatgggccaagaagattgaagccagagaaaggaaagccaagatgacagattttgatcgttttaaagttatgaaggcaaagaaaatgaggaacagaataatcaagaatgaagttaagaagcttcaaaaggcagctctcctgaaagcttctcccaaaaaagcacctggtactaagggtactgctgctgctgctgctgctgctgcagcagcaacaacagcagcagcagcagcagcagcagcagcagcagcagcagcagcaacagcagcagcagcaacagacgacgacgacctctcaggtgcaagttccacagatccagggccaggcccagtccccagcacagatcaaagctgtgggcaagctgacgccggaacacctcatcaaaatgcagaagcagaaactgcagatgcccccgcagcccccaccgccacaggcccagtctgcgcccccgcagccaacagcccaagtgcaagtgcagacctcgcagccgccgcagcagcagagcccccagctcacgacggtcacggccccaaggcctggtgccctgctgacgggcaccaccgtggccaacctccaggtggcccggctcacccgggttcccacttctcagctgcaggcgcaagggcagatgcagacccaggcaccccagccagcccaggtggccttggcgaagcctccggtggtgtccgtcccggcagctgtggtctcctcaccgggagtcaccaccctgcccatgaacgtcgcggggatcagcgtggcgatcggtcagccacagaaggcagcaggacagaccgtggtggcccagcccgtgcacatgcagcagctgctgaagctgaagcagcaggccgtccagcagcagaaggccatccagccccaggctgcacagggcccggcagccgtccagcagaagatcaccgcacagcagatcaccacccctggcgcgcagcagaaggttgcctacgccgcgcagccggcccttaagacccagtttcttaccacacccatctcccaggcccagaaactggccggggcccagcaagtgcagacccagatccaggttgcaaaacttcctcaagttgttcaacagcaaacacccgtggccagcatccagcaagttgcctctgcttcccagcaggcttctccacagactgtggcgctcacgcaggcgacggcggccgggcagcaggtgcagatgatccctgcagtgaccgcgactgcccaggtggttcagcagaaactcattcagcagcaggtggtgaccacggcgtcggccccgctccagactccaggcgctcccaacccagcccaggtgcccgccagctccgacagcccaagccagcagcccaagttacagatgagggtccctgctgtcaggctaaagacacctactaagcctccgtgccagtagtcagggcagcagggctgcctctcatctaaagcaaaactaccttcctcacagaaaacgctttattagtgaaccttgggaccatgtcacgcaagagattcagcactgggaaagatataattgaaacaaaatagtgtaatcattttattaaaatgcatcccacactgcaggacaaatggtccttatggagtgccgcgttctctgtactacgtggctcatggaaaaagtgacaacatggcttcctctaaatcatttcacctttcagtccccacccgcacccgtcccctagagccatagtactgtgttctgaaagccatttagaatttctttgtgagcatgtagtgctttgcacgccacagaagccgtctgccgtgtgtgaggagcatacaatggactttctaaagataaggcgtgggcttccacagtgtctgccagagtttagttctttataccttactgaaaaatgcctcgtggtcttcgcagaggggaaggcctgtctaaagtcaatcatccgagatgggttttccattccaaagaaaggcaatatggttccttccttccctcctaaaatatgacttaacttttaagagaaatgttctgacacccacctaaacacacaaggcacgttcctggcctgtgttcaagggaaatgatcagtcattgcattgttattccaaagagcagccaacagtggcctcccccaggccctaccctgcaatgggattcgctttcatttaatggaaacttctgggactgatgcccaactcagtgcactcaagacgcatctccagttttcgggggaagctggtatttgacatagtgtgttaaacagctcctgagaacctttgggacactctgccatggctggcgtgaggcccagaggaccacgcagaggcaatggtagtacagatgtcacagctgagggtacgatgaggcctgggctcagtgagccaggacgaatgtgacagacaccccttgctgccacagtcagccctttgacgaaggtgggctggtgattctggaagtattggctatagcggtgggcccagtcaactcttccttgtggacttacgacagcagattttctctaggataagcttgtgtggttctgccagtgaagcagagaaccacctgtgctgttgtggaaggcgtgccgttgagggggaaaacgaagcccagtatttgctactgtttttcctttttttactatgacaggaaaataaatgcaattttagtggaattgattgacagtgtctccttactttgaagttttcaccaaagcaaaaaggtccatatccaatagtatcctttgtgctgtggcttgattttggcctattttacattatttggtccaggaaattaggttatattaggttttttgtatactaaaaatcagttatggcacaataaagattttctgtttttaaattgtatttcatctgcttcctccccattctctcactttaagtgacattgaggaaggtattctgtcccacaggtttctgtggacagcgatacagcaggagtcagtgaaatcaactggggagctcacttgagctcttgataagaaatgtggagaaaagtaaaaaccaagctttgaagaaacagaagaaattaatcttttagttagttgaacataccaaagcagaggactggaatctgtttgttctaaccaacccgttctccctggcttggcacgtgccgtgagagcgcagcttgccggagggagggccgctgtgtgcgcctcacatctggctcccagtggaaacttttactcctcctcatccgcagatgtgatagaactgaagtatctaggaattctgcctttgtcatttgttttaatttgtgtgccctgttcattttttttgtctttcccaaatcttggtagtctccttatagttgaagataaaatgttgagtgcacttattttagaatatcctagacataactgtctaagtaaaagcgctctattaatctaaaacactacaagagaatttaacaccatctctcaaatgcttttttggagagcttaatgggattctgaatatttgcaatgtggagtttccgccccgatctcacgtcagtgagggtctcctgtctctcaagtgtgtttcctttggctgttccctaatacaaaacacggacatatttttactcgtagcactcaatttagtaacttctagatgctaccgttgacctgagttaaattcatttagtcgtgtacgtaaaaactctccttttagtgtgttattttcttggccttcccttttaaaggttaaagtttctaacctaagaattaagtacgcgttcaggaagctgttgtctaggccttccccttgtgaatctgggttcattccaatacggcaagtaagagttggaaactttgagaacacagactataaaggcagcagcccgaacactgtcagactctaattggcgaccctgggaaacagttgccctgctattctttaaagaaagacgtttattctgatgataaaaacagttagccagactgtttttaaagcacctggcgggaagcagaaggttggatccaagcccttgttcagatttggtgcctgataagacaggggtttctctttttgtgacctttattattattattttgttaactgttgtaaccagttagctgttgtgttttaagatagaaaggaacaagactaaaattgtaaatactttgtaaacatcagcatttgtacttgaatagtaggattttaaagggcattgatagcataccaaacaaaaggcaaaataaagtgacctttttatata

SEQ ID NO: 917 - DNA, 4459 bp, Homo sapiens; identical to SEQ ID NO: 916
  misc_feature (470)..(470): second gene starts at position 470

SEQ ID NO: 918 - DNA, 3148 bp, Homo sapiens
  misc_feature (149)..(149): second gene starts at position 149
ggtaatcactttgatcagtatgaggaaggacacttggaaattgaacaagcgtcacttgacaagcctatagaatcggataatattggacaccgcttactccagaaacatgggtggaagctgggccagggattgggaaaatctcttcaggtatccagtccagccagaagaagagccaaaagctctcagcacctcttgaccaagaatgtggtgatcgagtcggacctgtacacgcaccagcccctggagctgctgccccaccgcggagaccgcagggaccctggcgaccgccgcaggtttgggcggctccagaccgcgcggccgcccacagcccacccggccaaagcctctgccagacccgtggggatttctgaacccaaaacatcaaatctgtgtgggaatcgagcatatggaaaatctctgataccgccagtgccccggatctcagtgaaaacttcagcctctgcctcattggaggcgacagccatgggcacagagaagggagctgttctgatgagaggatccagacatctcaagaagatgactgaagagtatccagcccttccccaaggagcagaagcctctctaccactgacaggcagtgcttcctgcggcgtccccggcatcctccggaaaatgtggacaaggcacaagaagaagtctgaatatgtgggagccaccaacagcgcctttgaggccgactaaaggtgaccctcttcaagtgccctgtgttggccaaggttccccggacaagaggaaaaaccttcaggattgaaactgagccacacgcacctctgctagtagctggtccaaacccattatcctccctcactcattgattaccctgggatagggcacaggaaagaaatgtccctcgaaggcaatataaaactgccccttcttagaattgctaaagccattggtctgaaagtgactttgggaggtcataaagtttgtatctctatctttaagcaaaaaattaaactttcccagctcattttaaagacctccaaggaaggaaaaaagcaattcctctgtcttccttgtgagttgctctaaagtgtgtgattttctagtgtaaatggactttgaggcacttgtaaacacaatggttcttactgtttccattactgcatttacttcaccttgacaaggtacaattttcaaggacaaagcactatatataaagttagtagttctaatatccacttgagagtatactcaagattgattttcatggccatttggcatgattgcatgaattctctattcttttatgtgcagtttttctatagaaaaacattaaaagttaaatgttgactgctaatgttttctgaagtggcatagtctagtggaatcaataatcccttgctttggtataataatttgaacttttgaaagtgctttctcatccgttatctcttatcttcacaaaacccctgtggaagaaagcacaattattcccaatctgcagagggggaaatggaggccttcagagattacaggaccagataccaggtagtggaaccagacagcaggtccttaacttctctccagtggactccctgctttgcctactctctagcaactgacttggggaagtttttaaatggtgagagtgtgtctctgggggcaaccattgaaaagaagactctgatatgttggaacaagtaagggatttgaatgaaatacactattatatcttatatgttagcttgaaccagaaaaagttgacatttttgtaggtcaaaaacaattgagcatcaatttcatatggttcaacctcatatatgatactatgcttttcttctatcagtgaaaatgtcatcatcaattccattgtcaacattagtagccttaaaacaataacataataataatgatgataatgatacttatagctatcatctattaaatgcctatgtttcaggcatgatactaggcaatttatatatatcatcctaatctttctaaaaactctattaggtggccctatccacttaatagatgccaattcaaagaggttaaatgattagactaaggcacctaacttatgtgagtgtcaggcttcaatgcctgtgttagagctactccttcacacaaaatagttcagaacatagagaaggaccaaggttaataaatgattttcatcccaaacactaaacatgattgatgggtagaggctgcccgaagtactgtgtaaagatggaatctgagatagaagaatgctgtggtcaattagtaattcttgcccatggagggattagtgacacatgccttgtatatttgtcatctgtggcctaaactctgcccctgaaggtttgttttctaattcagaggtttaaattaatctagcccacttaataaaaccagagatcctatgggaaatttagcctaagacagtgctggaaattgccatatgttgatacaaagaagtgtttggccacattacaggtctcagactcaactgctatgtgtgactgccgctctgtgcctatgtcttgcttttttgctgagttccctatttccatatctccaggtgaatccatgagaagcgagagggtggctgagaggcctgggcctctgggattccaccttgctatctctgctcttcaaccattgttttagactctgaacaccagatcctcatatctgaaagtgatttggagacctgggcatcaagtgctcttttaagaaggggctatcccagaggactgttcaaaagtctcattcaatagagatgttggagtccagaacaaagttagggagcaaaccagtaacctatgctggtcgtaacagaggatcctacaattacgtttgtttttaagacaggattttgctgtgttgcccagactggtctcaaactcctgggttcaagagatccatcctcccacctcagtctcctgaaagctgggatgacaggcacatgccaccacacctagctccttacaaccatttattttaacttatttcatttataactggtatctttcatttgtatgtggcagctagagatttatataggatggaagtaatttatttttaatttaaatatttcatgttgaactgtttgccttgtatggaacattttacttggccaattcaaataaaaataaagtcagctttgtttgtgacattcatgcaccaccat

SEQ ID NO: 919 - DNA, 1275 bp, Homo sapiens
  misc_feature (337)..(337): second gene starts at position 337
atgagctcagccgcggccgaccactgggcgtggttgctggtgctcagcttcgtgtttggatgcaatgttcttaggatcctcctcccgtccttctcatccttcatgtccagggtgctgcagaaggacgcggagcaggagtcacagatgagagcggagatccaggacatgaagcaggagctctccacagtcaacatgatggacgagtttgccagatatgccaggctggaaagaaagatcaacaagatgacggataagctcaaaacccatgtgaaagctcggacagctcaattagccaagataaaatgggtgataagtgtcgctttctacgtattgcagattaggaagaaacagcaagaagtagtgggttttttggaagcgaataaaatcgactttaaggaattagatattgctggagatgaagacaacaggaggtggatgagagagaatgttcctggagagaaaaaacctcaaaatgggattcctttgcctccccagatcttcaatgaggagcagtactgtggggattttgactctttcttctctgcaaaagaagagaatattatttattccttccttggtttggctcctcctccagactcaaagggatcagagaaggctgaagaaggtggagaaactgaggcacaaaaagagggcagtgaagatgtgggcaacctccctgaagcccaggagaagaatgaagaagaaggagagacagccacagaagagacggaagaaatagccatggagggtgcggaaggggaagccgaggaggaggaagaaactgcagaaggagaagagcctggagaagacgaagattcctaggccttttcatgcttcatttcttccacttctccagaaaatggaagctatgaagcaacatttcaaatgtctctccacaaaccaaactcaacagaatactttggcttgaagccggcacacccagggttactgaggacttatgctgcctgacctggttagatgtacatggaggtatctcccgaatcatacaaaattaaatgtgaagaccgtttatgcataccttcatgtgcctgacagtcttggcttttgaagatttttttttcttttttgctctgcatagctagaccatcttattaataatactctgaaaaaaatgatttcaaggcatggaagttctctgtgatacaacaatagtatttcttcaaatgcgccttatgctacttatctcagaaacaggttttaaaatgaagtgctttccagagaaccatcatataaataaagattaatagaaaaata

SEQ ID NO: 920 - DNA, 1275 bp, Homo sapiens; identical to SEQ ID NO: 919
  misc_feature (337)..(337): second gene starts at position 337

SEQ ID NO: 921 - DNA, 1173 bp, Homo sapiens
  misc_feature (235)..(235): second gene starts at position 235
atgtccagggtgctgcagaaggacgcggagcaggagtcacagatgagagcggagatccaggacatgaagcaggagctctccacagtcaacatgatggacgagtttgccagatatgccaggctggaaagaaagatcaacaagatgacggataagctcaaaacccatgtgaaagctcggacagctcaattagccaagataaaatgggtgataagtgtcgctttctacgtattgcagattaggaagaaacagcaagaagtagtgggttttttggaagcgaataaaatcgactttaaggaattagatattgctggagatgaagacaacaggaggtggatgagagagaatgttcctggagagaaaaaacctcaaaatgggattcctttgcctccccagatcttcaatgaggagcagtactgtggggattttgactctttcttctctgcaaaagaagagaatattatttattccttccttggtttggctcctcctccagactcaaagggatcagagaaggctgaagaaggtggagaaactgaggcacaaaaagagggcagtgaagatgtgggcaacctccctgaagcccaggagaagaatgaagaagaaggagagacagccacagaagagacggaagaaatagccatggagggtgcggaaggggaagccgaggaggaggaagaaactgcagaaggagaagagcctggagaagacgaagattcctaggccttttcatgcttcatttcttccacttctccagaaaatggaagctatgaagcaacatttcaaatgtctctccacaaaccaaactcaacagaatactttggcttgaagccggcacacccagggttactgaggacttatgctgcctgacctggttagatgtacatggaggtatctcccgaatcatacaaaattaaatgtgaagaccgtttatgcataccttcatgtgcctgacagtcttggcttttgaagatttttttttcttttttgctctgcatagctagaccatcttattaataatactctgaaaaaaatgatttcaaggcatggaagttctctgtgatacaacaatagtatttcttcaaatgcgccttatgctacttatctcagaaacaggttttaaaatgaagtgctttccagagaaccatcatataaataaagattaatagaaaaata

SEQ ID NO: 922 - DNA, 1173 bp, Homo sapiens; identical to SEQ ID NO: 921
  misc_feature (235)..(235): second gene starts at position 235

SEQ ID NO: 923 - DNA, 1275 bp, Homo sapiens; identical to SEQ ID NO: 919
  misc_feature (337)..(337): second gene starts at position 337

SEQ ID NO: 924 - DNA, 1275 bp, Homo sapiens; identical to SEQ ID NO: 919
  misc_feature (337)..(337): second gene starts at position 337

SEQ ID NO: 925 - DNA, 1173 bp, Homo sapiens; identical to SEQ ID NO: 921
  misc_feature (235)..(235): second gene starts at position 235

SEQ ID NO: 926 - DNA, 1173 bp, Homo sapiens; identical to SEQ ID NO: 921
  misc_feature (235)..(235): second gene starts at position 235

SEQ ID NO: 927 - DNA, 1275 bp, Homo sapiens; identical to SEQ ID NO: 919
  misc_feature (337)..(337): second gene starts at position 337

SEQ ID NO: 928 - DNA, 1275 bp, Homo sapiens; identical to SEQ ID NO: 919
  misc_feature (337)..(337): second gene starts at position 337

SEQ ID NO: 929 - DNA, 1173 bp, Homo sapiens; identical to SEQ ID NO: 921
  misc_feature (235)..(235): second gene starts at position 235

SEQ ID NO: 930 - DNA, 1173 bp, Homo sapiens; identical to SEQ ID NO: 921
  misc_feature (235)..(235): second gene starts at position 235

SEQ ID NO: 931 - DNA, 5148 bp, Homo sapiens
  misc_feature (1313)..(1313): second gene starts at position 131
atgggccccggccccagccgcgcgccccgcgccccacgcctgatgctctgtgcgctcgccttgatggtggcggccggcggctgcgtcgtctccgccttcaacctggatacccgattcctggtagtgaaggaggccgggaacccgggcagcctcttcggctactcggtcgccctccatcggcagacagagcggcagcagcgctacctgctcctggctggtgccccccgggagctcgctgtgcccgatggctacaccaaccggactggtgctgtgtacctgtgcccactcactgcccacaaggatgactgtgagcggatgaacatcacagtgaaaaatgaccctggccatcacattattgaggacatgtggcttggagtgactgtggccagccagggccctgcaggcagagttctggtctgtgcccaccgctacacccaggtgctgtggtcagggtcagaagaccagcggcgcatggtgggcaagtgctacgtgcgaggcaatgacctagagctggactccagtgatgactggcagacctaccacaacgagatgtgcaatagcaacacagactacctggagacgggcatgtgccagctgggcaccagcggtggcttcacccagaacactgtgtacttcggcgcccccggtgcctacaactggaaaggaaacagctacatgattcagcgcaaggagtgggacttatctgagtatagttacaaggacccagaggaccaaggaaacctctatattgggtacacgatgcaggtaggcagcttcatcctgcaccccaaaaacatcaccattgtgacaggtgccccacggcaccgacatatgggcgcggtgttcttgctgagccaggaggcaggcggagacctgcggaggaggcaggtgctggagggctcgcaggtgggcgcctattttggcagcgccattgccctggcagacctgaacaatgatgggtggcaggacctcctggtgggcgccccctactacttcgagaggaaagaggaagtagggggtgccatctatgtcttcatgaaccaggcgggaacctccttccctgctcacccctcactccttcttcatggccccagtggctctgcctttggtttatctgtggccagcattggtgacatcaaccaggatggatttcaggatattgctgtgggagctccgtttgaaggcttgggcaaagtgtacatctatcacagtagctctaaggggctccttagacagccccagcaggtaatccatggagagaagctgggactgcctgggttggccaccttcggctattccctcagtgggcagatggatgtggatgagaacttctacccagaccttctagtgggaagcctgtcagaccacattgtgctgctgcgggcccggcccgtcatcaacatcgtccacaagaccttggtgcccaggccagctgtgctggaccctgcactttgcacggccacctcttgtgtgcaagtggagctgtgctttgcttacaaccagagtgccgggaaccccaactacaggcgaaacatcaccctggcctacactctggaggctgacagggaccgccggccgccccggctccgctttgccggcagtgagtccgctgtcttccacggcttcttctccatgcccgagatgcgctgccagaagctggagctgctcctgatggacaacctccgtgacaaactccgccccatcatcatctccatgaactactctttacctttgcggatgcccgatcgcccccggctggggctgcggtccctggacgcctacccgatcctcaaccaggcacaggctctggagaaccacactgaggtccagttccagaaggagtgcgggcctgacaacaagtgtgagagcaacttgcagatgcgggcagccttcgtgtcagagcagcagcagaagctgagcaggctccagtacagcagagacgtccggaaattgctcctgagcatcaacgtgacgaacacccggacctcggagcgctccggggaggacgcccacgaggcgctgctcaccctggtggtgcctcccgccctgctgctgtcctcagtgcgcccccccggggcctgccaagctaatgagaccatcttttgcgagctggggaaccccttcaaacggaaccagaggatggagctgctcatcgcctttgaggtcatcggggtgaccctgcacacaagggaccttcaggtgcagctgcagctctccacgtcgagtcaccaggacaacctgtggcccatgatcctcactctgctggtggactatacactccagacctcgcttagcatggtaaatcaccggctacaaagcttctttggggggacagtgatgggtgagtctggcatgaaaactgtggaggatgtaggaagccccctcaagtatgaattccaggtgggcccaatgggggaggggctggtgggcctggggaccctggtcctaggtctggagtggccctacgaagtcagcaatggcaagtggctgctgtatcccacggagatcaccgtccatggcaatgggtcctggccctgccgaccacctggagaccttatcaaccctctcaacctcactctttctgaccctggggacaggccatcatccccacagcgcaggcggcgacagctggatccagggggaggccagggccccccacctgtcactctggctgctgccaaaaaagccaagtctgagactgtgctgacctgtgccacagggcgtgcccactgtgtgtggctagagtgccccatccctgatgcccccgttgtcaccaacgtgactgtgaaggcacgagtgtggaacagcaccttcatcgaggattacagagactttgaccgagtccgggtaaatggctgggctaccctattcctccgaaccagcatccccaccatcaacatggagaacaagaccacgtggttctctgtggacattgactcggagctggtggaggagctgccggccgaaatcgagctgtggctggtgctggtggccgtgggtgcagggctgctgctgctggggctgatcatcctcctgctgtggaagtgtgacttctttaagcggacccgctattatcagatcatgcccaagtaccacgcagtgcggatccgggaggaggagcgctacccacctcccacgcggaggaggagccagggcagctgggagcggggacaccatcctcctggataagaggcagaggccgggaggaaccccgtcagccgggcgggcaggaagctctgggagtagcctcatggaagagaagcagatcctgtgcgtggggctagtggtgctggacgtcatcagcctggtggacaagtaccctaaggaggactcggagataaggtgtttgtcccagagatggcagcgcggaggcaacgcgtccaactcctgcaccgttctctccctgctcggagccccctgtgccttcatgggctcaatggctcctggccatgttgctgacttcctggtggccgacttcaggcggcggggcgtggacgtgtctcaggtggcctggcagagcaagggggacacccccagctcctgctgcatcatcaacaactccaatggcaaccgtaccattgtgctccatgacacgagcctgccagatgtgtctgctacagactttgagaaggttgatctgacccagttcaagtggatccacattgagggccggaacgcatcggagcaggtgaagatgctgcagcggatagacgcacacaacaccaggcagcctccagagcagaagatccgggtgtccgtggaggtggagaagccacgagaggagctcttccagctgtttggctacggagacgtggtgtttgtcagcaaagatgtggccaagcacttggggttccagtcagcagaggaagccttgaggggcttgtatggtcgtgtgaggaaaggggctgtgcttgtctgtgcctgggctgaggagggcgccgacgccctgggccctgatggcaaattgctccactcggatgctttcccgccaccccgcgtggtggatacactgggagctggagacaccttcaatgcctccgtcatcttcagcctctcccaggggaggagcgtgcaggaagcactgagattcgggtgccaggtggccggcaagaagtgtggcctgcagggctttgatggcatcgtgtgagagcaggtgccggctcctcacacaccatggagactaccattgcggctgcatcgccttctcccctccatccagcctggcgtccaggttgccctgttcaggggacagatgcaagctgtggggaggactctgcctgtgtcctgtgttccccacagggagaggctctggggggatggctgggggatgcagagcctcagagcaaataaatcttcctcagagccagcttctcctctcaatgtctgaactgctctggctgggcattcctgaggctctgactcttcgatcctccctctttgtgtccattccccaaattaacctctccgcccaggcccagaggaggggctgcctgggctagagcagcgagaagtgccctgggcttgccaccagctctgccctggctggggaggacactcggtgccccacacccagtgaacctgccaaagaaaccgtgagagctcttcggggccctgcgttgtgcagactctattcccacagctcagaagctgggagtccacaccgctgagctgaactgacaggccagtggggggcaggggtgcgcctcctctgccctgcccaccagcctgtgatttgatggggtcttcattgtccagaaatacctcctcccgctgactgccccagagcctgaaagtctcacccttggagcccaccttggaattaagggcgtgcctcagccacaaatgtgacccaggatacagagtgttgctgtcctcagggaggtccgatctggaacacatattggaattggggccaactccaatatagggtgggtaaggccttataatgtaaagagcatataatgtaaagggctttagagtgagacagacctggattaaaatctgccatttaattagctgcatatcaccttagggtacagcacttaacgcaatctgcctcaatttcttcatctgtcaaatggaaccaattctgcttggctacagaattattgtgaggataaaatcatatataaaatgcccagcatgatg

SEQ ID NO: 932 - DNA, 5148 bp, Homo sapiens
  misc_feature (132)..(132): second gene starts at position 132
atgggccccggccccagccgcgcgccccgcgccccacgcctgatgctctgtgcgctcgccttgatggtggcggccggcggctgcgtcgtctccgccttcaacctggatacccgattcctggtagtgaaggaggccgggaacccgggcagcctcttcggctactcggtcgccctccatcggcagacagagcggcagcagcgctacctgctcctggctggtgccccccgggagctcgctgtgcccgatggctacaccaaccggactggtgctgtgtacctgtgcccactcactgcccacaaggatgactgtgagcggatgaacatcacagtgaaaaatgaccctggccatcacattattgaggacatgtggcttggagtgactgtggccagccagggccctgcaggcagagttctggtctgtgcccaccgctacacccaggtgctgtggtcagggtcagaagaccagcggcgcatggtgggcaagtgctacgtgcgaggcaatgacctagagctggactccagtgatgactggcagacctaccacaacgagatgtgcaatagcaacacagactacctggagacgggcatgtgccagctgggcaccagcggtggcttcacccagaacactgtgtacttcggcgcccccggtgcctacaactggaaaggaaacagctacatgattcagcgcaaggagtgggacttatctgagtatagttacaaggacccagaggaccaaggaaacctctatattgggtacacgatgcaggtaggcagcttcatcctgcaccccaaaaacatcaccattgtgacaggtgccccacggcaccgacatatgggcgcggtgttcttgctgagccaggaggcaggcggagacctgcggaggaggcaggtgctggagggctcgcaggtgggcgcctattttggcagcgccattgccctggcagacctgaacaatgatgggtggcaggacctcctggtgggcgccccctactacttcgagaggaaagaggaagtagggggtgccatctatgtcttcatgaaccaggcgggaacctccttccctgctcacccctcactccttcttcatggccccagtggctctgcctttggtttatctgtggccagcattggtgacatcaaccaggatggatttcaggatattgctgtgggagctccgtttgaaggcttgggcaaagtgtacatctatcacagtagctctaaggggctccttagacagccccagcaggtaatccatggagagaagctgggactgcctgggttggccaccttcggctattccctcagtgggcagatggatgtggatgagaacttctacccagaccttctagtgggaagcctgtcagaccacattgtgctgctgcgggcccggcccgtcatcaacatcgtccacaagaccttggtgcccaggccagctgtgctggaccctgcactttgcacggccacctcttgtgtgcaagtggagctgtgctttgcttacaaccagagtgccgggaaccccaactacaggcgaaacatcaccctggcctacactctggaggctgacagggaccgccggccgccccggctccgctttgccggcagtgagtccgctgtcttccacggcttcttctccatgcccgagatgcgctgccagaagctggagctgctcctgatggacaacctccgtgacaaactccgccccatcatcatctccatgaactactctttacctttgcggatgcccgatcgcccccggctggggctgcggtccctggacgcctacccgatcctcaaccaggcacaggctctggagaaccacactgaggtccagttccagaaggagtgcgggcctgacaacaagtgtgagagcaacttgcagatgcgggcagccttcgtgtcagagcagcagcagaagctgagcaggctccagtacagcagagacgtccggaaattgctcctgagcatcaacgtgacgaacacccggacctcggagcgctccggggaggacgcccacgaggcgctgctcaccctggtggtgcctcccgccctgctgctgtcctcagtgcgcccccccggggcctgccaagctaatgagaccatcttttgcgagctggggaaccccttcaaacggaaccagaggatggagctgctcatcgcctttgaggtcatcggggtgaccctgcacacaagggaccttcaggtgcagctgcagctctccacgtcgagtcaccaggacaacctgtggcccatgatcctcactctgctggtggactatacactccagacctcgcttagcatggtaaatcaccggctacaaagcttctttggggggacagtgatgggtgagtctggcatgaaaactgtggaggatgtaggaagccccctcaagtatgaattccaggtgggcccaatgggggaggggctggtgggcctggggaccctggtcctaggtctggagtggccctacgaagtcagcaatggcaagtggctgctgtatcccacggagatcaccgtccatggcaatgggtcctggccctgccgaccacctggagaccttatcaaccctctcaacctcactctttctgaccctggggacaggccatcatccccacagcgcaggcggcgacagctggatccagggggaggccagggccccccacctgtcactctggctgctgccaaaaaagccaagtctgagactgtgctgacctgtgccacagggcgtgcccactgtgtgtggctagagtgccccatccctgatgcccccgttgtcaccaacgtgactgtgaaggcacgagtgtggaacagcaccttcatcgaggattacagagactttgaccgagtccgggtaaatggctgggctaccctattcctccgaaccagcatccccaccatcaacatggagaacaagaccacgtggttctctgtggacattgactcggagctggtggaggagctgccggccgaaatcgagctgtggctggtgctggtggccgtgggtgcagggctgctgctgctggggctgatcatcctcctgctgtggaagtgtgacttctttaagcggacccgctattatcagatcatgcccaagtaccacgcagtgcggatccgggaggaggagcgctacccacctcccacgcggaggaggagccagggcagctgggagcggggacaccatcctcctggataagaggcagaggccgggaggaaccccgtcagccgggcgggcaggaagctctgggagtagcctcatggaagagaagcagatcctgtgcgtggggctagtggtgctggacgtcatcagcctggtggacaagtaccctaaggaggactcggagataaggtgtttgtcccagagatggcagcgcggaggcaacgcgtccaactcctgcaccgttctctccctgctcggagccccctgtgccttcatgggctcaatggctcctggccatgttgctgattttgtcctggatgacctccgccgctattctgtggacctacgctacacagtctttcagaccacaggctccgtccccatcgccacggtcatcatcaacgaggccagtggtagccgcaccatcctatactatgacaggagcctgccagatgtgtctgctacagactttgagaaggttgatctgacccagttcaagtggatccacattgagggccggaacgcatcggagcaggtgaagatgctgcagcggatagacgcacacaacaccaggcagcctccagagcagaagatccgggtgtccgtggaggtggagaagccacgagaggagctcttccagctgtttggctacggagacgtggtgtttgtcagcaaagatgtggccaagcacttggggttccagtcagcagaggaagccttgaggggcttgtatggtcgtgtgaggaaaggggctgtgcttgtctgtgcctgggctgaggagggcgccgacgccctgggccctgatggcaaattgctccactcggatgctttcccgccaccccgcgtggtggatacactgggagctggagacaccttcaatgcctccgtcatcttcagcctctcccaggggaggagcgtgcaggaagcactgagattcgggtgccaggtggccggcaagaagtgtggcctgcagggctttgatggcatcgtgtgagagcaggtgccggctcctcacacaccatggagactaccattgcggctgcatcgccttctcccctccatccagcctggcgtccaggttgccctgttcaggggacagatgcaagctgtggggaggactctgcctgtgtcctgtgttccccacagggagaggctctggggggatggctgggggatgcagagcctcagagcaaataaatcttcctcagagccagcttctcctctcaatgtctgaactgctctggctgggcattcctgaggctctgactcttcgatcctccctctttgtgtccattccccaaattaacctctccgcccaggcccagaggaggggctgcctgggctagagcagcgagaagtgccctgggcttgccaccagctctgccctggctggggaggacactcggtgccccacacccagtgaacctgccaaagaaaccgtgagagctcttcggggccctgcgttgtgcagactctattcccacagctcagaagctgggagtccacaccgctgagctgaactgacaggccagtggggggcaggggtgcgcctcctctgccctgcccaccagcctgtgatttgatggggtcttcattgtccagaaatacctcctcccgctgactgccccagagcctgaaagtctcacccttggagcccaccttggaattaagggcgtgcctcagccacaaatgtgacccaggatacagagtgttgctgtcctcagggaggtccgatctggaacacatattggaattggggccaactccaatatagggtgggtaaggccttataatgtaaagagcatataatgtaaagggctttagagtgagacagacctggattaaaatctgccatttaattagctgcatatcaccttagggtacagcacttaacgcaatctgcctcaatttcttcatctgtcaaatggaaccaattctgcttggctacagaattattgtgaggataaaatcatatataaaatgcccagcatgatg

SEQ ID NO: 933 - DNA, 1284 bp, Homo sapiens
  misc_feature (75)..(75): second gene starts at position 75
atgttctctccctggaagatatcaatgtttctgtctgttcgtgaggactccgtgcccaccacggcctctttcagggtctcagtccgtcggcccagactgaagtgcagtggcacaatcatagctcgctgcagcctcgaccttccaggcttaaacgattctcccacctcagcctctcgagttgctgggaccacaggtcactgtgcatggcatcatcctggccccctctagagctccaatcctccaaccagagccagctcttccctcaaaatgctacggcctgtgacaatgctccagaagcctgggacctgctgcacagagtgctgccaacatttatcatctccatctgtttcttcggcctcctagggaacctttttgtcctgttggtcttcctcctgccccggcggcaactgaacgtggcagaaatctacctggccaacctggcagcctctgatctggtgtttgtcttgggcttgcccttctgggcagagaatatctggaaccagtttaactggcctttcggagccctcctctgccgtgtcatcaacggggtcatcaaggccaatttgttcatcagcatcttcctggtggtggccatcagccaggaccgctaccgcgtgctggtgcaccctatggccagccggaggcagcagcggcggaggcaggcccgggtcacctgcgtgctcatctgggttgtggggggcctcttgagcatccccacattcctgctgcgatccatccaagccgtcccagatctgaacatcaccgcctgcatcctgctcctcccccatgaggcctggcactttgcaaggattgtggagttaaatattctgggtttcctcctaccactggctgcgatcgtcttcttcaactaccacatcctggcctccctgcgaacgcgggaggaggtcagcaggacaaggtgcgggggccgcaaggatagcaagaccacagcgctgatcctcacgctcgtggttgccttcctggtctgctgggccccttaccacttctttgccttcctggaattcttattccaggtgcaagcagtccgaggctgcttttgggaggacttcattgacctgggcctgcaattggccaacttctttgccttcactaacagctccctgaatccagtaatttatgtctttgtgggccggctcttcaggaccaaggtctgggaactttataaacaatgcacccctaaaagtcttgctccaatatcttcatcccataggaaagaaatcttccaacttttctggcggaattaaaacagcattgaaccaagaa

SEQ ID NO: 934 - DNA, 1284 bp, Homo sapiens; identical to SEQ ID NO: 933
  misc_feature (75)..(75): second gene starts at position 75

SEQ ID NO: 935 - DNA, 3755 bp, Homo sapiens
  misc_feature (503)..(503): second gene starts at position 503
atggtgttcaggcgcttcgtggaggttggccgggtggcctatgtctcctttggacctcatgccggaaaattggtcgcgattgtagatgttattgatcagaacagggctttggtcgatggaccttgcactcaagtgaggagacaggccatgcctttcaagtgcatgcagctcactgatttcatcctcaagtttccgcacagtgcccaccagaagtatgtccgacaagcctggcagaaggcagacatcaatacaaaatgggcagccacacgatgggccaagaagattgaagccagagaaaggaaagccaagatgacagattttgatcgttttaaagttatgaaggcaaagaaaatgaggaacagaataatcaagaatgaagttaagaagcttcaaaaggcagctctcctgaaagcttctcccaaaaaagcacctggtactaagggtactgctgctgctgctgctgctgctgctgctgctaaagttccagcaaaaaagatcaccggttaccagcagcagcagcagcagcagcagcagcagcagcatccccagtgctgagaaagtccccaccaccaagtccacactctggcaggaagaaatgaggaccaaggaccagccagatggcagcagcctgagtccagctcagagtcccagccagagccagcctcctgctgccagctccctgcgggaacctgggctagagagcaaagaagaggagagcgccatgagtagcgaccgcatggactgtggccgcaaagtccgggtggagagcggctacttctctctggagaagaccaaacaggacttgaaggctgaagaacagcagctgcccccgccgctctcccctcccagccccagcacccccaaccacaggaggtcccaggtgattgaaaagtttgaggccttggacattgagaaggcagagcacatggagaccaatgcagtggggccctcaccatccagcgacacacgccagggccgcagcgagaagagggcgttccctaggaagcgggacttcaccaatgaagcccccccagctcctctcccagacgcctcggcttcccccctgtctccacaccgaagagccaagtcactggacaggaggtccacggagccctccgtgacgcccgacctgctgaatttcaagaaaggctggctgactaagcagtatgaggacggccagtggaagaaacactggtttgtcctcgccgatcaaagcctgagatactacagggattcagtggctgaggaggcagccgacttggatggagaaattgacttgtccgcatgttacgatgtcacagagtatccagttcagagaaactatggcttccagatacatacaaaggagggcgagtttaccctgtcggccatgacatctgggattcggcggaactggatccagaccatcatgaagcacgtgcacccgaccactgccccggatgtgaccagctcgttgccagaggaaaaaaacaagagcagctgctcttttgagacctgcccgaggcctactgagaagcaagaggcagagctgggggagccggaccctgagcagaagaggagccgcgcacgggagcggaggcgagagggccgctccaagacctttgactgggctgagttccgtcccatccagcaggccctggctcaggagcgggtgggcggcgtggggcctgctgacacccacgagcccctgcgccctgaggcggagcctggggagctggagcgggagcgtgcacggaggcgggaggagcgccgcaagcgcttcgggatgctcgacgccacagacgggccaggcactgaggatgcagccctgcgcatggaggtggaccggagcccagggctgcctatgagcgacctcaaaacgcataacgtccacgtggagattgagcagcggtggcatcaggtggagaccacacctctccgggaagagaagcaggtgcccatcgcccccgtccacctgtcttctgaagatgggggtgaccggctctccacacacgagctgacctctctgctcgagaaggagctggagcagagccagaaggaggcctcagaccttctggagcagaaccggctcctgcaggaccagctgagggtggccctgggccgggagcagagcgcccgtgagggctacgtgctgcaggccacgtgcgagcgagggtttgcagcaatggaagaaacgcaccagaagaagattgaagatctccagaggcagcaccagcgggagctagagaaacttcgagaagagaaagaccgcctcctagccgaggagacagcggccaccatctcagccatcgaagccatgaagaacgcccaccgggaggaaatggagcgggagctggagaagagccagcggtcccagatcagcagcgtcaactcggatgttgaggccctgcggcgccagtacctggaggagctgcagtcggtgcagcgggaactggaggtcctctcggagcagtactcgcagaagtgcctggagaatgcccatctggcccaggcgctggaggccgagcggcaggccctgcggcagtgccagcgtgagaaccaggagctcaatgcccacaaccaggagctgaacaaccgcctggctgcagagatcacacggttgcggacgctgctgactggggacggcggtggggaggccactgggtcaccccttgcacagggcaaggatgcctatgaactagaggtcttattgcgggtaaaggaatcggaaatacagtacctgaaacaggagattagctccctcaaggatgagctgcagacggcactgcgggacaagaagtacgcaagtgacaagtacaaagacatctacacagagctcagcatcgcgaaggctaaggctgactgtgacatcagcaggttgaaggagcagctcaaggctgcaacggaagcactgggggagaagtcccctgacagtgccacggtgtccggatatgatataatgaaatctaaaagcaaccctgacttcttgaagaaagacagatcctgtgtcacccggcaactcagaaacatcaggtccaagagtctgaaggaaggcctgacggtgcaagaacggttgaagctctttgaatccagggacttgaagaaagactaggtgtgtcccatccaagttgagcacgcgccttccccagcttgcagcagcacaccccaagcgctgcttttcacctgtacctttgttttattattattattattattgctgttgttgtcatcgttaactgtgggcatggaatgcgtgaggctggcttctgggttgtccacaccactctctgctgtgttgacttcctgttgtcttcatcaaagcttttttccgtggtattctaaaattaggccagcagtgggggctgggagggcatctgtgttagtcctttcctggctgtgacccgccacactcactgtcagtattaaggcccagcagcctgttgataagctaccctgtctcaccatgtgctggtgtggaaacggggcccagccagcacgcctcaaggtagatggaatccccactggtcagagaaaaagctatgcggacactccagcttggcctgggtcacagcactgactcctcacccgctagtctggctgttaagaggagaaagtgcactgccttccagcccaggaggaggacagcattttgtatttgttccactgatgcagcttagaaccacacccctgagagtcgtggcaaacctttcacaacctggaaaatgttgaaagcaaccattcctatttttgtttgttttttattaaatcttgcacaa

SEQ ID NO: 936 - DNA, 3819 bp, Homo sapiens
  misc_feature (503)..(503): second gene starts at position 503
atggtgttcaggcgcttcgtggaggttggccgggtggcctatgtctcctttggacctcatgccggaaaattggtcgcgattgtagatgttattgatcagaacagggctttggtcgatggaccttgcactcaagtgaggagacaggccatgcctttcaagtgcatgcagctcactgatttcatcctcaagtttccgcacagtgcccaccagaagtatgtccgacaagcctggcagaaggcagacatcaatacaaaatgggcagccacacgatgggccaagaagattgaagccagagaaaggaaagccaagatgacagattttgatcgttttaaagttatgaaggcaaagaaaatgaggaacagaataatcaagaatgaagttaagaagcttcaaaaggcagctctcctgaaagcttctcccaaaaaagcacctggtactaagggtactgctgctgctgctgctgctgctgctgctgctaaagttccagcaaaaaagatcaccggttaccagcagcagcagcagcagcagcagcagcagcagcatccccagtgctgagaaagtccccaccaccaagtccacactctggcaggaagaaatgaggaccaaggaccagccagatggcagcagcctgagtccagctcagagtcccagccagagccagcctcctgctgccagctccctgcgggaacctgggctagagagcaaagaagaggagagcgccatgagtagcgaccgcatggactgtggccgcaaagtccgggtggagagcggctacttctctctggagaagaccaaacaggacttgaaggctgaagaacagcagctgcccccgccgctctcccctcccagccccagcacccccaaccacaggaggtcccaggtgattgaaaagtttgaggccttggacattgagaaggcagagcacatggagaccaatgcagtggggccctcaccatccagcgacacacgccagggccgcagcgagaagagggcgttccctaggaagcgggacttcaccaatgaagcccccccagctcctctcccagacgcctcggcttcccccctgtctccacaccgaagagccaagtcactggacaggaggtccacggagccctccgtgacgcccgacctgctgaatttcaagaaaggctggctgactaagcagtatgaggacggccagtggaagaaacactggtttgtcctcgccgatcaaagcctgagatactacagggattcagtggctgaggaggcagccgacttggatggagaaattgacttgtccgcatgttacgatgtcacagagtatccagttcagagaaactatggcttccagatacatacaaaggagggcgagtttaccctgtcggccatgacatctgggattcggcggaactggatccagaccatcatgaagcacgtgcacccgaccactgccccggatgtgaccagctcgttgccagaggaaaaaaacaagagcagctgctcttttgagacctgcccgaggcctactgagaagcaagaggcagagctgggggagccggaccctgagcagaagaggagccgcgcacgggagcggaggcgagagggccgctccaagacctttgactgggctgagttccgtcccatccagcaggccctggctcaggagcgggtgggcggcgtggggcctgctgacacccacgagcccctgcgccctgaggcggagcctggggagctggagcgggagcgtgcacggaggcgggaggagcgccgcaagcgcttcgggatgctcgacgccacagacgggccaggcactgaggatgcagccctgcgcatggaggtggaccggagcccagggctgcctatgagcgacctcaaaacgcataacgtccacgtggagattgagcagcggtggcatcaggtggagaccacacctctccgggaagagaagcaggtgcccatcgcccccgtccacctgtcttctgaagatgggggtgaccggctctccacacacgagctgacctctctgctcgagaaggagctggagcagagccagaaggaggcctcagaccttctggagcagaaccggctcctgcaggaccagctgagggtggccctgggccgggagcagagcgcccgtgagggctacgtgctgcaggccacgtgcgagcgagggtttgcagcaatggaagaaacgcaccagaagaagattgaagatctccagaggcagcaccagcgggagctagagaaacttcgagaagagaaagaccgcctcctagccgaggagacagcggccaccatctcagccatcgaagccatgaagaacgcccaccgggaggaaatggagcgggagctggagaagagccagcggtcccagatcagcagcgtcaactcggatgttgaggccctgcggcgccagtacctggaggagctgcagtcggtgcagcgggaactggaggtcctctcggagcagtactcgcagaagtgcctggagaatgcccatctggcccaggcgctggaggccgagcggcaggccctgcggcagtgccagcgtgagaaccaggagctcaatgcccacaaccaggagctgaacaaccgcctggctgcagagatcacacggttgcggacgctgctgactggggacggcggtggggaggccactgggtcaccccttgcacagggcaaggatgcctatgaactagaggtcttattgcgggtaaaggaatcggaaatacagtacctgaaacaggagattagctccctcaaggatgagctgcagacggcactgcgggacaagaagtacgcaagtgacaagtacaaagacatctacacagagctcagcatcgcgaaggctaaggctgactgtgacatcagcaggttgaaggagcagctcaaggctgcaacggaagcactgggggagaagtcccctgacagtgccacggtgtccggatatgatataatgaaatctaaaagcaaccctgacttcttgaagaaagacagatcctgtgtcacccggcaactcagaaacatcaggtccaagtccgtaattgagcaggtctcgtgggatacctgaaatgcacccgcttcccggcccatgcaggagagtctgaaggaaggcctgacggtgcaagaacggttgaagctctttgaatccagggacttgaagaaagactaggtgtgtcccatccaagttgagcacgcgccttccccagcttgcagcagcacaccccaagcgctgcttttcacctgtacctttgttttattattattattattattgctgttgttgtcatcgttaactgtgggcatggaatgcgtgaggctggcttctgggttgtccacaccactctctgctgtgttgacttcctgttgtcttcatcaaagcttttttccgtggtattctaaaattaggccagcagtgggggctgggagggcatctgtgttagtcctttcctggctgtgacccgccacactcactgtcagtattaaggcccagcagcctgttgataagctaccctgtctcaccatgtgctggtgtggaaacggggcccagccagcacgcctcaaggtagatggaatccccactggtcagagaaaaagctatgcggacactccagcttggcctgggtcacagcactgactcctcacccgctagtctggctgttaagaggagaaagtgcactgccttccagcccaggaggaggacagcattttgtatttgttccactgatgcagcttagaaccacacccctgagagtcgtggcaaacctttcacaacctggaaaatgttgaaagcaaccattcctatttttgtttgttttttattaaatcttgcacaaa

SEQ ID NO: 937 - DNA, 3755 bp, Homo sapiens; identical to SEQ ID NO: 935
  misc_feature (503)..(503): second gene starts at position 503

SEQ ID NO: 938 - DNA, 3819 bp, Homo sapiens; identical to SEQ ID NO: 936
  misc_feature (503)..(503): second gene starts at position 503

SEQ ID NO: 939 - DNA, 1413 bp, Homo sapiens
  misc_feature (1030)..(1030): second gene starts at position 1030
atggaagaagagatcgccgcgctggtcattgacaatggctccggcatgtgcaaagctggttttgctggggacgacgctccccgagccgtgtttccttccatcgtcgggcgccccagacaccagggcgtcatggtgggcatgggccagaaggactcctacgtgggcgacgaggcccagagcaagcgtggcatcctgaccctgaagtaccccattgagcatggcatcgtcaccaactgggacgacatggagaagatctggcaccacaccttctacaacgagctgcgcgtggccccggaggagcacccagtgctgctgaccgaggcccccctgaaccccaaggccaacagagagaagatgactcagattatgtttgagaccttcaacaccccggccatgtacgtggccatccaggccgtgctgtccctctacgcctctgggcgcaccactggcattgtcatggactctggagacggggtcacccacacggtgcccatctacgagggctacgccctcccccacgccatcctgcgtctggacctggctggccgggacctgaccgactacctcatgaagatcctcactgagcgaggctacagcttcaccaccacggccgagcgggaaatcgtgcgcgacatcaaggagaagctgtgctacgtcgccctggacttcgagcaggagatggccaccgccgcatcctcctcttctctggagaagagctacgagctgcccgatggccaggtcatcaccattggcaatgagcggttccggtgtccggaggcgctgttccagccttccttcctgggtatggaatcttgcggcatccacgagaccaccttcaactccatcatgaagtgtgacgtggacatccgcaaagacctgtacgccaacacggtgctgtcgggcggcaccaccatgtacccgggcattgccgacaggatgcagaaggagatcaccgccctggcgcccagcaccatgaagatcaagatcatcgcacccccagagcgcaagtactcggtgtggatcggtggcttgagtggcaacttcacgacttttatttgtggtgcctgtgctttatctcgaaaataccttctccccctgccccagacagtgggcggggagggggcagcaaaaaatagaagacgtccctccctattgcacatggaccctatatacaggcccacctggctgaggctggcgggactcttggcacattcttggatccctgctcaggaggggaggggtgacggggtggcatcacacgtgagatggggacctccaggcggccactctggtcctggctactgatccttgcacttcttggtcctcagttccttcctggtcccgtctctggccctggtcccctctggcaacgtccccctgcttggctcggcctcccacctccatcctggcctc

SEQ ID NO: 940 - DNA, 2378 bp, Homo sapiens
  misc_feature (186)..(186): second gene starts at position 186
atggctgagctggatccgttcggcgcccctgccggcgcccctggcggtcccgcgctggggaacggagtggccggcgccggcgaagaagacccggctgcggccttcttggcgcagcaagagagcgagattgcgggcatcgagaacgacgaggccttcgccatcctggacggcggcgcccccgggccctgcgctcgctgcggctggggcccgggggcctggacgaccgctacagcctggtgtctgagcagctggagcccgcggccacctccacctacagggcctttgcgtacgagcgccaggccagctccagctccagccgggcaggggggctggactggcccgaggccactgaggtttccccgagccggaccatccgtgcccctgccgtgcggaccctgcagcgattccagagcagccaccggagccgcggggtaggcggggcagtgccgggggccgtcctggagccagtggctcgagcgccatctgtgcgcagcctcagcctcagcctggctgactcgggccacctgccggacgtgcatgggttcaacagctacggtagccaccgaaccctgcagagactcagcagcggttttgatgacattgacctgccctcagcagtcaagtacctcatggcttcagaccccaacctgcaggtgctgggagcggcctacatccagcacaagtgctacagcgatgcagccgccaagaagcaggcccgcagccttcaggccgtgcctaggctggtgaagctcttcaaccacgccaaccaggaagtgcagcgccatgccacaggtgccatgcgcaacctcatctacgacaacgctgacaacaagctggccctggtggaggagaacgggatcttcgagctgctgcggacactgcgggagcaggatgatgagcttcgcaaaaatgtcacagggatcctgtggaacctttcatccagcgaccacctgaaggaccgcctggccagagacacgctggagcagctcacagacctggtgttgagccccctgtcgggggctgggggtccccccctcatccagcagaacgcctcggaggcagagatcttctacaacgccaccggcttcctcaggaacctcagctcagcctctcaggccactcgccagaagatgcgggagtgccacgggctggtggacgccctggtcacctctatcaaccacgccctggacgcgggcaaatgcgaggacaagagcgtggagaacgcggtgtgcgtcctgcggaacctgtcctaccgcctctacgacgagatgccgccgtccgcgctgcagcggctggagggtcgcggccgcagggacctggcgggggcgccgccgggagaggtcgtgggctgcttcacgccgcagagccggcggctgcgcgagctgcccctcgccgccgatgcgctcaccttcgcggaggtgtccaaggaccccaagggcctcgagtggctgtggagcccccagatcgtggggctgtacaaccggctgctgcagcgctgcgagctcaaccggcacacgacggaggcggccgccggggcgctgcagaacatcacggcaggcgaccgcaggtgggcgggggtgctgagccgcctggccctggagcaggagcgtattctgaaccccctgctagaccgtgtcaggaccgccgaccaccaccagctgcgctcactgactggcctcatccgaaacctgtctcggaacgctaggaacaaggacgagatgtccacgaaggtggtgagccacctgatcgagaagctgccgggcagcgtgggtgagaagtcgcccccagccgaggtgctggtcaacatcatagctgtgctcaacaacctggtggtggccagccccatcgctgcccgagacctgctgtattttgacggactccgaaagctcatcttcatcaagaagaagcgggacagccccgacagtgagaagtcctcccgggcagcatccagcctcctggccaacctgtggcagtacaacaagctccaccgtgacttccgggcgaagggctatcggaaggaggacttcctgggcccataggtgaagccttctggaggagaaggtgacgtggcccagcgtccaagggacagactcagctccaggctgcttggcagcccagcctggaggagaaggctaatgacggaggggcccctcgctggggcccctgtgtgcatctttgagggtcctgggccaccaggaggggcagggtcttatagctggggacttggcttccgcagggcagggggtggggcagggctcaaggctgctctggtgtatggggtggtgacccagtcacattggcagaggtgggggttggctgtggcctggcagtatcttgggatagccagcactgggaataaagatggccatgaacagtca

SEQ ID NO: 941 - DNA, 2378 bp, Homo sapiens; identical to SEQ ID NO: 940
  misc_feature (186)..(186): second gene starts at position 186

SEQ ID NO: 942 - DNA, 2378 bp, Homo sapiens; identical to SEQ ID NO: 940
  misc_feature (186)..(186): second gene starts at position 186

SEQ ID NO: 943 - DNA, 2378 bp, Homo sapiens; identical to SEQ ID NO: 940
  misc_feature (186)..(186): second gene starts at position 186

SEQ ID NO: 944 - DNA, 2378 bp, Homo sapiens; identical to SEQ ID NO: 940
  misc_feature (186)..(186): second gene starts at position 186

SEQ ID NO: 945 - DNA, 2378 bp, Homo sapiens; identical to SEQ ID NO: 940
  misc_feature (186)..(186): second gene starts at position 186

SEQ ID NO: 946 - DNA, 4477 bp, Homo sapiens
  misc_feature (1705)..(1705): second gene starts at position 1705
atgccggacagtaacttcgcagagcgcagcgaggagcaggtgtctggtgctaaagtcatcgctcaggccctgaaaacgcaagatgtggagtacatatttggcatcgtaggcatcccagtgaccgaaatcgccattgctgcccagcagctaggcatcaagtacatcgggatgaggaatgagcaagcggcttgttatgctgcctccgcgattggatatctgacaagcaggccaggagtctgccttgttgtttctggcccaggtctcatccatgccttgggcggtatggcaaatgcaaacatgaactgctggcccttgcttgtgattggtggttcctctgaaagaaaccaagaaacaatgggagctttccaggagtttcctcaggttgaagcttgtagattatataccaagttctctgcccgcccaagcagcatagaagctattccttttgttattgaaaaggcagtgagaagcagtatctatggtcgtccaggtgcttgctatgttgacataccagcagattttgtgaaccttcaggtgaatgtgaattctataaagtacatggaacgctgcatgtcacctcctattagcatggcagaaacctctgctgtgtgcacggcggcttctgttattaggaatgccaaacaaccccttcttatcatcgggaaaggtgctgcttacgctcatgcagaagagagtatcaagaaattggtggagcaatataaactgccatttttgcccacccctatggggaagggtgttgtccctgacaaccatccatactgtgtaggtgcagccagatccagggctttgcaatttgctgatgtaattgtgttatttggtgccagactaaattggattttacattttggactgcctccaagatatcagccagatgtgaagtttatccaggttgatatctgtgcagaagaattggggaataatgtaaagcccgctgttactttgctaggaaacatacatgctgtcactaagcagcttttagaggaacttgataaaacaccatggcagtatcctccagagagcaagtggtggaaaactctgagagaaaaaatgaagagcaatgaagctgcatccaaggaactagcttctaaaaaatccctgcctatgaattattacacagtattctaccatgttcaagaacaactacctagagactgtttcgtggtaagtgaaggagcaaatactatggacattggacggactgtgcttcagaactaccttcctcgtcacaggcttgatgctggtactttcggaacaatgggagttggtttgggatttgctattgcagctgccgtggtggctaaagatagaagccctgggcaatggatcatctgtgtggaaggagacagtgcatttgggttttctggcatggaggtagaaaccatctgcaggtacaacttgccaatcatactgttggtagtgaataacaatggaatttaccaaggttttgatacagatacttggaaagaaatgttaaaatttcaagatgctactgcagtggtccctccaatgtgtttgctgccaaattcacattatgagcaagtcatgactgcatttggaggcaaagggtattttgtacaaacaccagaagaactccaaaaatccctgaggcagagcctagcagacacaactaaaccttctcttatcaacatcatgattgagccacaagccacacggaaggcccagcccttcccagcctggatcagaagaagcgtggtggccacaaagcatgctgcctgctgacgcctcctccaccaccactgttcccaccaccattcttcagaggtggccgaagtccgcttctctccccagacatgaagaatctcatgctggaactggagacctcgcagtccccgtgcatgcaaggctcgctaggctcccctgggcctcccggcccccagggtccaccggggcttcctggcaagacaggaccaaagggagaaaagggggagcttggccgaccaggaaggaagggtagacctggccccccaggtgttcctggcatgcctgggcccatcggttggccaggccctgaaggacccaggggtgaaaaaggtgacctgggtatgatgggcttgccagggtcaagaggaccaatgggctccaagggctaccctggatccagaggggaaaagggatccagaggtgaaaagggtgacctgggtcccaaaggagaaaagggtttcccaggatttcctggaatgttggggcagaaaggtgaaatgggtccaaaaggtgaacctgggatagcaggacaccgaggacccacaggaagaccaggaaaacgaggcaagcagggacagaaaggggatagtggagttatgggcccaccaggcaagcctgggccttctggtcaacctggccgtccggggcccccaggccccccacctgcaggacaacttataatgggacccaaaggggaaagaggatttcccgggcctccaggaagatgtctttgtggacccactatgaatgtgaataacccttcctacggggaatctgtgtatgggcccagttccccgcgagttcctgtgatttttgtggtcaacaaccaggaggagcttgagaggctgaacacccaaaacgccattgccttccgcagagaccagagatctctgtacttcaaggacagccttggctggctccccatccagctgacccctttctaccctgtggattacactgcagaccagcacggcacctgtggggatgggctcctgcagcctggggaggagtgtgacgacggtaacagcgatgtgggtgacgactgcatccgctgtcaccgtgcctactgtggagatggtcaccggcatgagggtgtggaggactgtgacggctctgactttggctacctgacatgcgagacctatctccctgggtcatatggagacctgcaatgcacccagtactgctacatcgactccacgccctgccgctacttcacctgagggccgtgaggagaaggtgggctgcgccccacagaactggcagcagcttctccactgtcatcaaactggccatgtcctggccccgtctccaccaacctttgtgtgacaaaaacaaggacaaattcctgctactaagacatgctgttaactcagtctgactggaagaatttaggaccactgcatcctgtcttaatccaaggtactggaaaaccttccacatgcccaacctgagacctgttccccatcgctaccatttggccaaacaaccggctacaatgctcttcctcttctggaatgttgctgacccaggccgtggacttggctgagcactgttagacacacacagacctgcaggctgttttagaatgttttgatctctttggggaatctggagtacaggcctctccgcccctgaccaccgaaacgtgcaggcattctcactcacactgggcagcccgctgtcgggtctctctaggcctatgaaccacaaagcagggaagtgggcacgttctctcggggtggctcacagctttgaacctgccaaaggacccctcgactggccacagcccagcccagcctgacgtggatgtggctgcccaggaaaagacttaactgtgaaaaagtactgagaacccacctgacccaggcttgccccaagcagaggctagagaagaggctcctcttctcagtgtttcccaaaggggcggctcttgtggtttcaaaatctctggcaccatcttgacctcttggctctctctgcactttgccccctgtctcaaaaatgtccctcatgtccatttcctgtccaggagactcatgaggactgtgtgacctgcacaagcccacacctgggcaggctgttggtgtctccttggtccttaggcagatactcccctgagtccccgatctagggccagctgcagagggctctctctaggcagagcgttcctggccagagctctacctctttgcctcctgctgacccctgacagcgtcccgtggcatttctttcatgtctgcatattgcatagccttgtcctcctgtgtgcctgagctcctcccttttcaataagattattagtcgtgcatgtctgtgagctgcctttcatcaccatttttcctgagtagggcttagttttattctggaaagacatctccaaggtgaggtccacccccacagcagacctcaagtagaaattgcccaatttttaccagctggagggacacccttgggtttttgtacgaagctatttaatgagcctgtgtcttggggactcagcaggctggagcttggggcctggtggaccatcacctggtgtctgtaggtggacccggtctcccacaggtgacatcaacctgagggtggcgtctttagagacaggcacatgggcagccctgttcccttcgcctctactgcgaggcctggggagatgttgttttcatgctgcttccaccatcacactggggtttctggatgggaaataaaaaaataaaggcagttcatttcccca

SEQ ID NO: 947 - DNA, 4477 bp, Homo sapiens; identical to SEQ ID NO: 946
  misc_feature (1705)..(1705): second gene starts at position 1705

SEQ ID NO: 948 - DNA, 4375 bp, Homo sapiens
  misc_feature (1705)..(1705): second gene starts at position 1705
atgccggacagtaacttcgcagagcgcagcgaggagcaggtgtctggtgctaaagtcatcgctcaggccctgaaaacgcaagatgtggagtacatatttggcatcgtaggcatcccagtgaccgaaatcgccattgctgcccagcagctaggcatcaagtacatcgggatgaggaatgagcaagcggcttgttatgctgcctccgcgattggatatctgacaagcaggccaggagtctgccttgttgtttctggcccaggtctcatccatgccttgggcggtatggcaaatgcaaacatgaactgctggcccttgcttgtgattggtggttcctctgaaagaaaccaagaaacaatgggagctttccaggagtttcctcaggttgaagcttgtagattatataccaagttctctgcccgcccaagcagcatagaagctattccttttgttattgaaaaggcagtgagaagcagtatctatggtcgtccaggtgcttgctatgttgacataccagcagattttgtgaaccttcaggtgaatgtgaattctataaagtacatggaacgctgcatgtcacctcctattagcatggcagaaacctctgctgtgtgcacggcggcttctgttattaggaatgccaaacaaccccttcttatcatcgggaaaggtgctgcttacgctcatgcagaagagagtatcaagaaattggtggagcaatataaactgccatttttgcccacccctatggggaagggtgttgtccctgacaaccatccatactgtgtaggtgcagccagatccagggctttgcaatttgctgatgtaattgtgttatttggtgccagactaaattggattttacattttggactgcctccaagatatcagccagatgtgaagtttatccaggttgatatctgtgcagaagaattggggaataatgtaaagcccgctgttactttgctaggaaacatacatgctgtcactaagcagcttttagaggaacttgataaaacaccatggcagtatcctccagagagcaagtggtggaaaactctgagagaaaaaatgaagagcaatgaagctgcatccaaggaactagcttctaaaaaatccctgcctatgaattattacacagtattctaccatgttcaagaacaactacctagagactgtttcgtggtaagtgaaggagcaaatactatggacattggacggactgtgcttcagaactaccttcctcgtcacaggcttgatgctggtactttcggaacaatgggagttggtttgggatttgctattgcagctgccgtggtggctaaagatagaagccctgggcaatggatcatctgtgtggaaggagacagtgcatttgggttttctggcatggaggtagaaaccatctgcaggtacaacttgccaatcatactgttggtagtgaataacaatggaatttaccaaggttttgatacagatacttggaaagaaatgttaaaatttcaagatgctactgcagtggtccctccaatgtgtttgctgccaaattcacattatgagcaagtcatgactgcatttggaggcaaagggtattttgtacaaacaccagaagaactccaaaaatccctgaggcagagcctagcagacacaactaaaccttctcttatcaacatcatgattgagccacaagccacacggaaggcccagcccttcccagcctggatcagaagaagcgtggtggccacaaagcatgctgcctgctgacgcctcctccaccaccactgttcccaccaccattcttcagaggtggccgaagtccgggtccaccggggcttcctggcaagacaggaccaaagggagaaaagggggagcttggccgaccaggaaggaagggtagacctggccccccaggtgttcctggcatgcctgggcccatcggttggccaggccctgaaggacccaggggtgaaaaaggtgacctgggtatgatgggcttgccagggtcaagaggaccaatgggctccaagggctaccctggatccagaggggaaaagggatccagaggtgaaaagggtgacctgggtcccaaaggagaaaagggtttcccaggatttcctggaatgttggggcagaaaggtgaaatgggtccaaaaggtgaacctgggatagcaggacaccgaggacccacaggaagaccaggaaaacgaggcaagcagggacagaaaggggatagtggagttatgggcccaccaggcaagcctgggccttctggtcaacctggccgtccggggcccccaggccccccacctgcaggacaacttataatgggacccaaaggggaaagaggatttcccgggcctccaggaagatgtctttgtggacccactatgaatgtgaataacccttcctacggggaatctgtgtatgggcccagttccccgcgagttcctgtgatttttgtggtcaacaaccaggaggagcttgagaggctgaacacccaaaacgccattgccttccgcagagaccagagatctctgtacttcaaggacagccttggctggctccccatccagctgacccctttctaccctgtggattacactgcagaccagcacggcacctgtggggatgggctcctgcagcctggggaggagtgtgacgacggtaacagcgatgtgggtgacgactgcatccgctgtcaccgtgcctactgtggagatggtcaccggcatgagggtgtggaggactgtgacggctctgactttggctacctgacatgcgagacctatctccctgggtcatatggagacctgcaatgcacccagtactgctacatcgactccacgccctgccgctacttcacctgagggccgtgaggagaaggtgggctgcgccccacagaactggcagcagcttctccactgtcatcaaactggccatgtcctggccccgtctccaccaacctttgtgtgacaaaaacaaggacaaattcctgctactaagacatgctgttaactcagtctgactggaagaatttaggaccactgcatcctgtcttaatccaaggtactggaaaaccttccacatgcccaacctgagacctgttccccatcgctaccatttggccaaacaaccggctacaatgctcttcctcttctggaatgttgctgacccaggccgtggacttggctgagcactgttagacacacacagacctgcaggctgttttagaatgttttgatctctttggggaatctggagtacaggcctctccgcccctgaccaccgaaacgtgcaggcattctcactcacactgggcagcccgctgtcgggtctctctaggcctatgaaccacaaagcagggaagtgggcacgttctctcggggtggctcacagctttgaacctgccaaaggacccctcgactggccacagcccagcccagcctgacgtggatgtggctgcccaggaaaagacttaactgtgaaaaagtactgagaacccacctgacccaggcttgccccaagcagaggctagagaagaggctcctcttctcagtgtttcccaaaggggcggctcttgtggtttcaaaatctctggcaccatcttgacctcttggctctctctgcactttgccccctgtctcaaaaatgtccctcatgtccatttcctgtccaggagactcatgaggactgtgtgacctgcacaagcccacacctgggcaggctgttggtgtctccttggtccttaggcagatactcccctgagtccccgatctagggccagctgcagagggctctctctaggcagagcgttcctggccagagctctacctctttgcctcctgctgacccctgacagcgtcccgtggcatttctttcatgtctgcatattgcatagccttgtcctcctgtgtgcctgagctcctcccttttcaataagattattagtcgtgcatgtctgtgagctgcctttcatcaccatttttcctgagtagggcttagttttattctggaaagacatctccaaggtgaggtccacccccacagcagacctcaagtagaaattgcccaatttttaccagctggagggacacccttgggtttttgtacgaagctatttaatgagcctgtgtcttggggactcagcaggctggagcttggggcctggtggaccatcacctggtgtctgtaggtggacccggtctcccacaggtgacatcaacctgagggtggcgtctttagagacaggcacatgggcagccctgttcccttcgcctctactgcgaggcctggggagatgttgttttcatgctgcttccaccatcacactggggtttctggatgggaaataaaaaaataaaggcagttcatttcccca

SEQ ID NO: 949 - DNA, 4477 bp, Homo sapiens; identical to SEQ ID NO: 946
  misc_feature (1705)..(1705): second gene starts at position 1705

SEQ ID NO: 950 - DNA, 4477 bp, Homo sapiens; identical to SEQ ID NO: 946
  misc_feature (1705)..(1705): second gene starts at position 1705

SEQ ID NO: 951 - DNA, 4375 bp, Homo sapiens; identical to SEQ ID NO: 948
  misc_feature (1705)..(1705): second gene starts at position 1705

SEQ ID NO: 952 - DNA, 3752 bp, Homo sapiens
  misc_feature (1070)..(1070): second gene starts at position 1070
atggcgcctcctccgccttcgccccaactgcttctcctggcagccctcgcgaggctcctgggtcccagcgaggtgatggctggaccggcggaggaggcgggagcccattgtcccgagagcctgtggcctctgcctccgcaggtgtcaccaagagtgacctacacacgagtgagcccagggcaggctgaggatgtcaccttcctctaccacccctgtgcccatccctggctgaagctccagcttgccctcctggcctatgcttgtatggctaacccttccctcacccctgacttcagcctcacgcaggatcggcccctggtgctgactgcatgggggctggcgctggagatggcctgggtagagccagcctgggctgcccactggctgatgaggaggcggaggaggaagcagaggaagaagaaggcatggatctactgtgaaagcctttcagggcctgctccctccgagccaactcccggtagagggaggctgtgccgaagagggtgtgtgcaggccctggctctggcctttgctctgcggagctggcggccccctggcacagaggtgacatctcaagggcccaggcagccctcttctagtggtgccaagaggcggaggctgcgggctgcccttggtccccagcccactcgctcagccctgaggtttccctctgcttccccagggagcttgaaggccaagcagtccatggcgggaatccctggtagggagagtaatgccccatctgtgcccactgtctccctgctgccgggggcgcctggaggcaatgccagctccaggacagaggctcaggtgcccaacgggcaaggcagcccagggggctgtgtctgttcaagtcaggcttccccggcccctcgcgcagcagcgcctccacgggcagcccggggccccaccccacgcactgaagaggccgcctgggctgccatggccctgaccttcctgctggtgctgctcaccctggccacgctctgcacacggctgcacagaaacttccgacgcggggagagcatctactgggggcccacagcggacagccaggacacagtggctggatgacatagtgctggatcttggttttatagatgggtccatatttttgttgttgatcacaaactgcgtttctccttttatcggcatgagcagcatcagcgattataaaaaaaatgttcaatcccagttatggatttcaggcctctggccttcagcatactggtgtggacaggctctggtggacattccattatacttcttgattctcttttcaatacatttaatttactacttcatatttctgggattccagctttcatgggaactcatgtttgttttggtggtatgcataattggttgtgcagtttctcttatattcctcacatatgtgctttcattcatctttcgcaagtggagaaaaaataatggcttttggtcttttggcttttttattatcttaatatgtgtatccacaattatggtatcaactcaatatgaaaaactcaacttaattttgtgcatgattttcataccttccttcactttgctggggtatgtcatgttattgatccagctcgactttatgagaaacttggacagtctggacaatagaataaatgaagtcaataaaaccattcttttaacaaccttaataccataccttcagagtgttattttcctttttgtcataaggtgtctggaaatgaagtatggaaatgaaataatgaataaagacccagttttcagaatctctccacggagtagagaaactcatcccaatccggaagagcccgaagaagaagatgaagatgttcaagctgaaagagtccaagcagcaaatgcactcactgctccaaacttggaggaggaaccagtcataactgcaagctgtttacacaaggaatattatgagacaaagaaaagttgcttttcaacaagaaagaagaaaatagccatcagaaatgtttccttttgtgttaaaaaaggtgaagttttgggattactaggacacaatggagctggtaaaagtacttccattaaaatgataactgggtgcacaaagccaactgcaggagtggtggtgttacaaggcagcagagcatcagtaaggcaacagcatgacaacagcctcaagttcttggggtactgccctcaggagaactcactgtggcccaagcttacaatgaaagagcacttggagttgtatgcagctgtgaaaggactgggcaaagaagatgctgctctcagtatttcacgattggtggaagctcttaagctccaggaacaacttaaggctcctgtgaaaactctatcagagggaataaagagaaagctgtgctttgtgctgagcatcctggggaacccatcagtggtgcttctagatgagccgttcaccgggatggaccccgaggggcagcagcaaatgtggcagatacttcaggctaccgttaaaaacaaggagaggggcaccctcttgaccacccattacatgtcagaggctgaggctgtgtgtgaccgtatggccatgatggtgtcaggaacgctaaggtgtattggttccattcaacatctgaaaaacaagtttggtagagattatttactagaaataaaaatgaaagaacctacccaggtggaagctctccacacagagattttgaagcttttcccacaggctgcttggcaggaaagatattcctctttaatggcgtataagttacctgtggaggatgtccaccctctatctcgggcctttttcaagttagaggcgatgaaacagaccttcaacctggaggaatacagcctctctcaggctaccttggagcaggtattcttagaactctgtaaagagcaggagctgggaaatgttgatgataaaattgatacaacagttgaatggaaacttctcccacaggaagacccttaaaatgaagaacctcctaacattcaattttaggtcctactacattgttagtttccataattctacaagaatgtttccttttacttcagttaacaaaagaaaacatttaataaacattcaataatgattacagttttcatttttaaaaatttaggatgaaggaaacaaggaaatatagggaaaagtagtagacaaaattaacaaaatcagacatgttattcatccccaacatgggtctattttgtgcttaaaaataatttaaaaatcatacaatattaggttggttatcggttattatcaataaagctaacactgagaacattttacaaataaaaatatgaggtttttagcctgaacttcaaatgtatcagctatttttaaacattatttactcggattctaatttaatgtgacattgactataagaaggtctgataaactgatgaaatggcacagcataacatttaattataatgacattctgattataaaataaatgcatgtgaattttagtacatattgaagttatatggaagaagatagccataatctgtaagaaagtaccgcagttaatattttctttagccaacttatattcaatgtattttttatggatcctttttcaaaggtagtatcagtaggcatagtcattttctgtatcttttcacctcacagttcatgaacatttcccatgtcattatagcacttttgtgttatataattgctgcattaatgttatagctgtattgatgtaataccagagttgttacgttcgggttatatgcaagtttatttcttagaaataaaactttgatggactttt

SEQ ID NO: 953 - DNA, 6092 bp, Homo sapiens
  misc_feature (16)..(16): second gene starts at position 16
atgttcagctttgtggacctccggctcctgctcctcttagcggccaccgccctcctgacgcacggccaagaggaaggccaagtcgagggccaagacgaagacatcccaccaatcacctgcgtacagaacggcctcaggtaccatgaccgagacgtgtggaaacccgagccctgccggatctgcgtctgcgacaacggcaaggtgttgtgcgatgacgtgatctgtgacgagaccaagaactgccccggcgccgaagtccccgagggcgagtgctgtcccgtctgccccgacggctcagagtcacccaccgaccaagaaaccaccggcgtcgagggacccaagggagacactggcccccgaggcccaaggggacccgcaggcccccctggccgagatggcatccctggacagcctggacttcccggaccccccggaccccccggacctcccggaccccctggcctcggaggaaactttgctccccagctgtcttatggctatgatgagaaatcaaccggaggaatttccgtgcctggccccatgggtccctctggtcctcgtggtctccctggcccccctggtgcacctggtccccaaggcttccaaggtccccctggtgagcctggcgagcctggagcttcaggtcccatgggtccccgaggtcccccaggtccccctggaaagaatggagatgatggggaagctggaaaacctggtcgtcctggtgagcgtgggcctcctgggcctcagggtgctcgaggattgcccggaacagctggcctccctggaatgaagggacacagaggtttcagtggtttggatggtgccaagggagatgctggtcctgctggtcctaagggtgagcctggcagccctggtgaaaatggagctcctggtcagatgggcccccgtggcctgcctggtgagagaggtcgccctggagcccctggccctgctggtgctcgtggaaatgatggtgctactggtgctgccgggccccctggtcccaccggccccgctggtcctcctggcttccctggtgctgttggtgctaagggtgaagctggtccccaagggccccgaggctctgaaggtccccagggtgtgcgtggtgagcctggcccccctggccctgctggtgctgctggccctgctggaaaccctggtgctgatggacagcctggtgctaaaggtgccaatggtgctcctggtattgctggtgctcctggcttccctggtgcccgaggcccctctggaccccagggccccggcggccctcctggtcccaagggtaacagcggtgaacctggtgctcctggcagcaaaggagacactggtgctaagggagagcctggccctgttggtgttcaaggaccccctggccctgctggagaggaaggaaagcgaggagctcgaggtgaacccggacccactggcctgcccggaccccctggcgagcgtggtggacctggtagccgtggtttccctggcgcagatggtgttgctggtcccaagggtcccgctggtgaacgtggttctcctggccctgctggccccaaaggatctcctggtgaagctggtcgtcccggtgaagctggtctgcctggtgccaagggtctgactggaagccctggcagccctggtcctgatggcaaaactggcccccctggtcccgccggtcaagatggtcgccccggacccccaggcccacctggtgcccgtggtcaggctggtgtgatgggattccctggacctaaaggtgctgctggagagcccggcaaggctggagagcgaggtgttcccggaccccctggcgctgtcggtcctgctggcaaagatggagaggctggagctcagggaccccctggccctgctggtcccgctggcgagagaggtgaacaaggccctgctggctcccccggattccagggtctccctggtcctgctggtcctccaggtgaagcaggcaaacctggtgaacagggtgttcctggagaccttggcgcccctggcccctctggagcaagaggcgagagaggtttccctggcgagcgtggtgtgcaaggtccccctggtcctgctggtccccgaggggccaacggtgctcccggcaacgatggtgctaagggtgatgctggtgcccctggagctcccggtagccagggcgcccctggccttcagggaatgcctggtgaacgtggtgcagctggtcttccagggcctaagggtgacagaggtgatgctggtcccaaaggtgctgatggctctcctggcaaagatggcgtccgtggtctgactggccccattggtcctcctggccctgctggtgcccctggtgacaagggtgaaagtggtcccagcggccctgctggtcccactggagctcgtggtgcccccggagaccgtggtgagcctggtccccccggccctgctggctttgctggcccccctggtgctgacggccaacctggtgctaaaggcgaacctggtgatgctggtgctaaaggcgatgctggtccccctggccctgccggacccgctggaccccctggccccattggtaatgttggtgctcctggagccaaaggtgctcgcggcagcgctggtccccctggtgctactggtttccctggtgctgctggccgagtcggtcctcctggcccctctggaaatgctggaccccctggccctcctggtcctgctggcaaagaaggcggcaaaggtccccgtggtgagactggccctgctggacgtcctggtgaagttggtccccctggtccccctggccctgctggcgagaaaggatcccctggtgctgatggtcctgctggtgctcctggtactcccgggcctcaaggtattgctggacagcgtggtgtggtcggcctgcctggtcagagaggagagagaggcttccctggtcttcctggcccctctggtgaacctggcaaacaaggtccctctggagcaagtggtgaacgtggtccccctggtcccatgggcccccctggattggctggaccccctggtgaatctggacgtgagggggctcctggtgccgaaggttcccctggacgagacggttctcctggcgccaagggtgaccgtggtgagaccggccccgctggaccccctggtgctcctggtgctcctggtgcccctggccccgttggccctgctggcaagagtggtgatcgtggtgagactggtcctgctggtcccaccggtcctgtcggccctgttggcgcccgtggccccgccggaccccaaggcccccgtggtgacaagggtgagacaggcgaacagggcgacagaggcataaagggtcaccgtggcttctctggcctccagggtccccctggccctcctggctctcctggtgaacaaggtccctctggagcctctggtcctgctggtccccgaggtccccctggctctgctggtgctcctggcaaagatggactcaacggtctccctggccccattgggccccctggtcctcgcggtcgcactggtgatgctggtcctgttggtccccccggccctcctggacctcctggtccccctggtcctcccagcgctggtttcgacttcagcttcctgccccagccacctcaagagaaggctcacgatggtggccgctactaccgggctgatgatgccaatgtggttcgtgaccgtgacctcgaggtggacaccaccctcaagagcctgagccagcagatcgagaacatccggagcccagagggcagccgcaagaaccccgcccgcacctgccgtgacctcaagatgtgccactctgactggaagagtggagagtactggattgaccccaaccaaggctgcaacctggatgccatcaaagtcttctgcaacatggagactggtgagacctgcgtgtaccccactcagcccagtgtggcccagaagaactggtacatcagcaagaaccccaaggacaagaggcatgtctggttcggcgagagcatgaccgatggattccagttcgagtatgttattgggagtgagcattcgtttctgcagctttgatggggcaaatgaaaatgtttggcatgtgctggaggtggaatcaaattctcctgcagcactggcaggtcttagaccacacagtgattatataattggagcagatacagtcatgaatgagtctgaagatctattcagccttatcgaaacacatgaagcaaaaccattgaaactgtatgtgtacaacacagacactgataactgtcgagaagtgattattacaccaaattctgcatggggtggagaaggcagcctaggatgtggcattggatatggttatttgcatcgaatacctacacgcccatttgaggaaggaaagaaaatttctcttccaggacaaatggctggtacacctattacacctcttaaagatgggtttacagaggtccagctgtcctcagttaatcccccgtctttgtcaccaccaggaactacaggaattgaacagagtctgactggactttctattagctcaactccaccagctgtcagtagtgttctcagtacaggtgtaccaacagtaccgttattgccaccacaagtaaaccagtccctcacttctgtgccaccaatgaatccagctactacattaccaggtctgatgcctttaccagcaggactgcccaacctccccaacctcaacctcaacctcccagcaccacacatcatgccaggggttggcttaccagaacttgtaaacccaggtctgccacctcttccttccatgcctccccgaaacttacctggcattgcacctctccccctgccatccgagttcctcccgtcattccccttggttccagagagctcttctgcagcaagctcaggagagctgctgtcttccctcccgcccaccagcaacgcaccctccgaccctgccacaactactgcaaaggcagacgctgcctcctcactcactgtggatgtgacgccccccactgccaaggcccccaccaccgttgaggacagagtcggcgactccaccccagtcagcgagaagcctgtttctgcggctgtggatgccaatgcttctgagtcaccttaactttgaaccattctttggaattggcgtggtatatttaaccacgggagcgtgtctggaaacgcaaactatcattaatttcatactagtttgtaccgtatctgtaggcatcctgtaaataattccaaggggaaaactaaacgaggacgtgggttgtatcctgccaggttgagtggggctcacacgctagggtgagatgtcagaaagcgcttgtattttaaacaaccaaaaagaattgtaagggtggcttgctgccaggcttgcactgccgttcctgggggtgtgcatcttcgggaaaggtggtggcggggcgtccactaggtttcctgtcccctgctgctccttccgtaagaaaatgaaatattctatgcctaatactcacacgcaacatttcttgtactttgtaagtcgtttgcgagaatgcagaccacctcactaaactgtaaacggtaaagagatttttacttttggtctccgtgagtcgcatctctactaaggtttacacaggaattccacctgaagacttgtgttaaagttctacagcgcgcactgttaactgaacgtctttttcttcagcctatacgcggatccttgttttgagctctcagaatcactcagacaacattttgtaactgctgctgttgctttctacatacaccttataaagtgacatttcaaaagaaataaggtgccacagttttaaaccagaaggtggcactctgtggctccttgtagtattatagctatactgggaaagcatagatacagcaataaagtacagtaattttactttttttcttgtgttacatctaaattacaacccttaattgccacgtgtgcacttactactctccagtatgtcttattactctccagtatgtcacgcatctttaacttttcacgtcctatgtttgctttctcccatttttaagagatggtaagttaactggaattgatttactgaatgaaattaaatgcagatatccctgtttttgaaataaga

SEQ ID NO: 954 - DNA, 6108 bp, Homo sapiens
  misc_feature (16)..(16): second gene starts at position 16
atgttcagctttgtggacctccggctcctgctcctcttagcggccaccgccctcctgacgcacggccaagaggaaggccaagtcgagggccaagacgaagacatcccaccaatcacctgcgtacagaacggcctcaggtaccatgaccgagacgtgtggaaacccgagccctgccggatctgcgtctgcgacaacggcaaggtgttgtgcgatgacgtgatctgtgacgagaccaagaactgccccggcgccgaagtccccgagggcgagtgctgtcccgtctgccccgacggctcagagtcacccaccgaccaagaaaccaccggcgtcgagggacccaagggagacactggcccccgaggcccaaggggacccgcaggcccccctggccgagatggcatccctggacagcctggacttcccggaccccccggaccccccggacctcccggaccccctggcctcggaggaaactttgctccccagctgtcttatggctatgatgagaaatcaaccggaggaatttccgtgcctggccccatgggtccctctggtcctcgtggtctccctggcccccctggtgcacctggtccccaaggcttccaaggtccccctggtgagcctggcgagcctggagcttcaggtcccatgggtccccgaggtcccccaggtccccctggaaagaatggagatgatggggaagctggaaaacctggtcgtcctggtgagcgtgggcctcctgggcctcagggtgctcgaggattgcccggaacagctggcctccctggaatgaagggacacagaggtttcagtggtttggatggtgccaagggagatgctggtcctgctggtcctaagggtgagcctggcagccctggtgaaaatggagctcctggtcagatgggcccccgtggcctgcctggtgagagaggtcgccctggagcccctggccctgctggtgctcgtggaaatgatggtgctactggtgctgccgggccccctggtcccaccggccccgctggtcctcctggcttccctggtgctgttggtgctaagggtgaagctggtccccaagggccccgaggctctgaaggtccccagggtgtgcgtggtgagcctggcccccctggccctgctggtgctgctggccctgctggaaaccctggtgctgatggacagcctggtgctaaaggtgccaatggtgctcctggtattgctggtgctcctggcttccctggtgcccgaggcccctctggaccccagggccccggcggccctcctggtcccaagggtaacagcggtgaacctggtgctcctggcagcaaaggagacactggtgctaagggagagcctggccctgttggtgttcaaggaccccctggccctgctggagaggaaggaaagcgaggagctcgaggtgaacccggacccactggcctgcccggaccccctggcgagcgtggtggacctggtagccgtggtttccctggcgcagatggtgttgctggtcccaagggtcccgctggtgaacgtggttctcctggccctgctggccccaaaggatctcctggtgaagctggtcgtcccggtgaagctggtctgcctggtgccaagggtctgactggaagccctggcagccctggtcctgatggcaaaactggcccccctggtcccgccggtcaagatggtcgccccggacccccaggcccacctggtgcccgtggtcaggctggtgtgatgggattccctggacctaaaggtgctgctggagagcccggcaaggctggagagcgaggtgttcccggaccccctggcgctgtcggtcctgctggcaaagatggagaggctggagctcagggaccccctggccctgctggtcccgctggcgagagaggtgaacaaggccctgctggctcccccggattccagggtctccctggtcctgctggtcctccaggtgaagcaggcaaacctggtgaacagggtgttcctggagaccttggcgcccctggcccctctggagcaagaggcgagagaggtttccctggcgagcgtggtgtgcaaggtccccctggtcctgctggtccccgaggggccaacggtgctcccggcaacgatggtgctaagggtgatgctggtgcccctggagctcccggtagccagggcgcccctggccttcagggaatgcctggtgaacgtggtgcagctggtcttccagggcctaagggtgacagaggtgatgctggtcccaaaggtgctgatggctctcctggcaaagatggcgtccgtggtctgactggccccattggtcctcctggccctgctggtgcccctggtgacaagggtgaaagtggtcccagcggccctgctggtcccactggagctcgtggtgcccccggagaccgtggtgagcctggtccccccggccctgctggctttgctggcccccctggtgctgacggccaacctggtgctaaaggcgaacctggtgatgctggtgctaaaggcgatgctggtccccctggccctgccggacccgctggaccccctggccccattggtaatgttggtgctcctggagccaaaggtgctcgcggcagcgctggtccccctggtgctactggtttccctggtgctgctggccgagtcggtcctcctggcccctctggaaatgctggaccccctggccctcctggtcctgctggcaaagaaggcggcaaaggtccccgtggtgagactggccctgctggacgtcctggtgaagttggtccccctggtccccctggccctgctggcgagaaaggatcccctggtgctgatggtcctgctggtgctcctggtactcccgggcctcaaggtattgctggacagcgtggtgtggtcggcctgcctggtcagagaggagagagaggcttccctggtcttcctggcccctctggtgaacctggcaaacaaggtccctctggagcaagtggtgaacgtggtccccctggtcccatgggcccccctggattggctggaccccctggtgaatctggacgtgagggggctcctggtgccgaaggttcccctggacgagacggttctcctggcgccaagggtgaccgtggtgagaccggccccgctggaccccctggtgctcctggtgctcctggtgcccctggccccgttggccctgctggcaagagtggtgatcgtggtgagactggtcctgctggtcccaccggtcctgtcggccctgttggcgcccgtggccccgccggaccccaaggcccccgtggtgacaagggtgagacaggcgaacagggcgacagaggcataaagggtcaccgtggcttctctggcctccagggtccccctggccctcctggctctcctggtgaacaaggtccctctggagcctctggtcctgctggtccccgaggtccccctggctctgctggtgctcctggcaaagatggactcaacggtctccctggccccattgggccccctggtcctcgcggtcgcactggtgatgctggtcctgttggtccccccggccctcctggacctcctggtccccctggtcctcccagcgctggtttcgacttcagcttcctgccccagccacctcaagagaaggctcacgatggtggccgctactaccgggctgatgatgccaatgtggttcgtgaccgtgacctcgaggtggacaccaccctcaagagcctgagccagcagatcgagaacatccggagcccagagggcagccgcaagaaccccgcccgcacctgccgtgacctcaagatgtgccactctgactggaagagtggagagtactggattgaccccaaccaaggctgcaacctggatgccatcaaagtcttctgcaacatggagactggtgagacctgcgtgtaccccactcagcccagtgtggcccagaagaactggtacatcagcaagaaccccaaggacaagaggcatgtctggttcggcgagagcatgaccgatggattccagttcgagtatggtggggcggccagggcttattgggagtgagcattcgtttctgcagctttgatggggcaaatgaaaatgtttggcatgtgctggaggtggaatcaaattctcctgcagcactggcaggtcttagaccacacagtgattatataattggagcagatacagtcatgaatgagtctgaagatctattcagccttatcgaaacacatgaagcaaaaccattgaaactgtatgtgtacaacacagacactgataactgtcgagaagtgattattacaccaaattctgcatggggtggagaaggcagcctaggatgtggcattggatatggttatttgcatcgaatacctacacgcccatttgaggaaggaaagaaaatttctcttccaggacaaatggctggtacacctattacacctcttaaagatgggtttacagaggtccagctgtcctcagttaatcccccgtctttgtcaccaccaggaactacaggaattgaacagagtctgactggactttctattagctcaactccaccagctgtcagtagtgttctcagtacaggtgtaccaacagtaccgttattgccaccacaagtaaaccagtccctcacttctgtgccaccaatgaatccagctactacattaccaggtctgatgcctttaccagcaggactgcccaacctccccaacctcaacctcaacctcccagcaccacacatcatgccaggggttggcttaccagaacttgtaaacccaggtctgccacctcttccttccatgcctccccgaaacttacctggcattgcacctctccccctgccatccgagttcctcccgtcattccccttggttccagagagctcttctgcagcaagctcaggagagctgctgtcttccctcccgcccaccagcaacgcaccctccgaccctgccacaactactgcaaaggcagacgctgcctcctcactcactgtggatgtgacgccccccactgccaaggcccccaccaccgttgaggacagagtcggcgactccaccccagtcagcgagaagcctgtttctgcggctgtggatgccaatgcttctgagtcaccttaactttgaaccattctttggaattggcgtggtatatttaaccacgggagcgtgtctggaaacgcaaactatcattaatttcatactagtttgtaccgtatctgtaggcatcctgtaaataattccaaggggaaaactaaacgaggacgtgggttgtatcctgccaggttgagtggggctcacacgctagggtgagatgtcagaaagcgcttgtattttaaacaaccaaaaagaattgtaagggtggcttgctgccaggcttgcactgccgttcctgggggtgtgcatcttcgggaaaggtggtggcggggcgtccactaggtttcctgtcccctgctgctccttccgtaagaaaatgaaatattctatgcctaatactcacacgcaacatttcttgtactttgtaagtcgtttgcgagaatgcagaccacctcactaaactgtaaacggtaaagagatttttacttttggtctccgtgagtcgcatctctactaaggtttacacaggaattccacctgaagacttgtgttaaagttctacagcgcgcactgttaactgaacgtctttttcttcagcctatacgcggatccttgttttgagctctcagaatcactcagacaacattttgtaactgctgctgttgctttctacatacaccttataaagtgacatttcaaaagaaataaggtgccacagttttaaaccagaaggtggcactctgtggctccttgtagtattatagctatactgggaaagcatagatacagcaataaagtacagtaattttactttttttcttgtgttacatctaaattacaacccttaattgccacgtgtgcacttactactctccagtatgtcttattactctccagtatgtcacgcatctttaacttttcacgtcctatgtttgctttctcccatttttaagagatggtaagttaactggaattgatttactgaatgaaattaaatgcagatatccctgtttttgaaataaga

SEQ ID NO: 955 - DNA, 32765 bp, Homo sapiens
  misc_feature (635)..(635): second gene starts at position 635
atgctcagctttgtggatacgcggactttgttgctgcttgcagtaaccttatgcctagcaacatgccaatctttacaagaggaaactgtaagaaagggcccagccggagatagaggaccacgtggagaaaggggtccaccaggccccccaggcagagatggtgaagatggtcccacaggccctcctggtccacctggtcctcctggcccccctggtctcggtgggaactttgctgctcagtatgatggaaaaggagttggacttggccctggaccaatgggcttaatgggacctagaggcccacctggtgcagctggagccccaggccctcaaggtttccaaggacctgctggtgagcctggtgaacctggtcaaactggtcctgcaggtgctcgtggtccagctggccctcctggcaaggctggtgaagatggtcaccctggaaaacccggacgacctggtgagagaggagttgttggaccacagggtgctcgtggtttccctggaactcctggacttcctggcttcaaaggcattaggggacacaatggtctggatggattgaagggacagcccggtgctcctggtgtgaagggtgaacctggtgcccctggtgaaaatggaactccaggtcaaacaggagcccgtgggcttcctggtgagagaggacgtgttggtgcccctggcccagctggtgcccgtggcagtgatggaagtgtgggtcccgtgggtcctgctggtcccattgggtctgctggccctccaggcttcccaggtgcccctggccccaagggtgaaattggagctgttggtaacgctggtcctgctggtcccgccggtccccgtggtgaagtgggtcttccaggcctctccggccccgttggacctcctggtaatcctggagcaaacggccttactggtgccaagggtgctgctggccttcccggcgttgctggggctcccggcctccctggaccccgcggtattcctggccctgttggtgctgccggtgctactggtgccagaggacttgttggtgagcctggtccagctggctccaaaggagagagcggtaacaagggtgagcccggctctgctgggccccaaggtcctcctggtcccagtggtgaagaaggaaagagaggccctaatggggaagctggatctgccggccctccaggacctcctgggctgagaggtagtcctggttctcgtggtcttcctggagctgatggcagagctggcgtcatgggccctcctggtagtcgtggtgcaagtggccctgctggagtccgaggacctaatggagatgctggtcgccctggggagcctggtctcatgggacccagaggtcttcctggttcccctggaaatatcggccccgctggaaaagaaggtcctgtcggcctccctggcatcgacggcaggcctggcccaattggcccagctggagcaagaggagagcctggcaacattggattccctggacccaaaggccccactggtgatcctggcaaaaacggtgataaaggtcatgctggtcttgctggtgctcggggtgctccaggtcctgatggaaacaatggtgctcagggacctcctggaccacagggtgttcaaggtggaaaaggtgaacagggtccccctggtcctccaggcttccagggtctgcctggcccctcaggtcccgctggtgaagttggcaaaccaggagaaaggggtctccatggtgagtttggtctccctggtcctgctggtccaagaggggaacgcggtcccccaggtgagagtggtgctgccggtcctactggtcctattggaagccgaggtccttctggacccccagggcctgatggaaacaagggtgaacctggtgtggttggtgctgtgggcactgctggtccatctggtcctagtggactcccaggagagaggggtgctgctggcatacctggaggcaagggagaaaagggtgaacctggtctcagaggtgaaattggtaaccctggcagagatggtgctcgtggtgctcctggtgctgtaggtgcccctggtcctgctggagccacaggtgaccggggcgaagctggggctgctggtcctgctggtcctgctggtcctcggggaagccctggtgaacgtggtgaggtcggtcctgctggccccaatggatttgctggtcctgctggtgctgctggtcaacctggtgctaaaggagaaagaggagccaaagggcctaagggtgaaaacggtgttgttggtcccacaggccccgttggagctgctggcccagctggtccaaatggtccccccggtcctgctggaagtcgtggtgatggaggcccccctggtatgactggtttccctggtgctgctggacggactggtcccccaggaccctctggtatttctggccctcctggtccccctggtcctgctgggaaagaagggcttcgtggtcctcgtggtgaccaaggtccagttggccgaactggagaagtaggtgcagttggtccccctggcttcgctggtgagaagggtccctctggagaggctggtactgctggacctcctggcactccaggtcctcagggtcttcttggtgctcctggtattctgggtctccctggctcggcggttccgctgccctgaggcactcttccagccttccttcctgggcatggagtcctgtggcatccacgaaactaccttcaactccatcatgaagtgtgacgtggacatccgcaaagacctgtacgccaacacagtgctgtctggcggcaccaccatgtaccctggcattgccgacaggatgcagaaggagatcactgccctggcacccagcacaatgaagatcaagatcattgctcctcctgagcgcaagtactccgtgtggatcggcggctccatcctggcctcgctgtccaccttccagcagatgtggatcagcaagcaggagtatgacgagtccggcccctccatcgtccaccgcaaatgcttctaggcggactatgacttagttgcgttacaccctttcttgacaaaacctaacttgcgcagaaaacaagatgagattggcatggctttatttgttttttttgttttgttttggttttttttttttttttggcttgactcaggatttaaaaactggaacggtgaaggtgacagcagtcggttggagcgagcatcccccaaagttcacaatgtggccgaggactttgattgcacattgttgtttttttaatagtcattccaaatatgagatgcgttgttacaggaagtcccttgccatcctaaaagccaccccacttctctctaaggagaatggcccagtcctctcccaagtccacacaggggaggtgatagcattgctttcgtgtaaattatgtaatgcaaaatttttttaatcttcgccttaatacttttttattttgttttattttgaatgatgagccttcgtgcccccccttcccccttttttgtcccccaacttgagatgtatgaaggcttttggtctccctgggagtgggtggaggcagccagggcttacctgtacactgacttgagaccagttgaataaaagtgcacaccttaaaaatgaaccgccgagaccgcgtccgccccgcgagcacagagcctcgcctttgccgatccgccgcccgtccacacccgccgccagctcaccatggatgatgatatcgccgcgctcgtcgtcgacaacggctccggcatgtgcaaggccggcttcgcgggcgacgatgccccccgggccgtcttcccctccatcgtggggcgccccaggcaccagggcgtgatggtgggcatgggtcagaaggattcctatgtgggcgacgaggcccagagcaagagaggcatcctcaccctgaagtaccccatcgagcacggcatcgtcaccaactgggacgacatggagaaaatctggcaccacaccttctacaatgagctgcgtgtggctcccgaggagcaccccgtgctgctgaccgaggcccccctgaaccccaaggccaaccgcgagaagatgacccagatcatgtttgagaccttcaacaccccagccatgtacgttgctatccaggctgtgctatccctgtacgcctctggccgtaccactggcatcgtgatggactccggtgacggggtcacccacactgtgcccatctacgaggggtatgccctcccccatgccatcctgcgtctggacctggctggccgggacctgactgactacctcatgaagatcctcaccgagcgcggctacagcttcaccaccacggccgagcgggaaatcgtgcgtgacattaaggagaagctgtgctacgtcgccctggacttcgagcaagagatggccacggctgcttccagctcctccctggagaagagctacgagctgcctgacggccaggtcatcaccattggcaatgagcggttccgctgccctgaggcactcttccagccttccttcctgggcatggagtcctgtggcatccacgaaactaccttcaactccatcatgaagtgtgacgtggacatccgcaaagacctgtacgccaacacagtgctgtctggcggcaccaccatgtaccctggcattgccgacaggatgcagaaggagatcactgccctggcacccagcacaatgaagatcaagatcattgctcctcctgagcgcaagtactccgtgtggatcggcggctccatcctggcctcgctgtccaccttccagcagatgtggatcagcaagcaggagtatgacgagtccggcccctccatcgtccaccgcaaatgcttctaggcggactatgacttagttgcgttacaccctttcttgacaaaacctaacttgcgcagaaaacaagatgagattggcatggctttatttgttttttttgttttgttttggttttttttttttttttggcttgactcaggatttaaaaactggaacggtgaaggtgacagcagtcggttggagcgagcatcccccaaagttcacaatgtggccgaggactttgattgcacattgttgtttttttaatagtcattccaaatatgagatgcgttgttacaggaagtcccttgccatcctaaaagccaccccacttctctctaaggagaatggcccagtcctctcccaagtccacacaggggaggtgatagcattgctttcgtgtaaattatgtaatgcaaaatttttttaatcttcgccttaatacttttttattttgttttattttgaatgatgagccttcgtgcccccccttcccccttttttgtcccccaacttgagatgtatgaaggcttttggtctccctgggagtgggtggaggcagccagggcttacctgtacactgacttgagaccagttgaataaaagtgcacaccttaaaaatgaaccgccgagaccgcgtccgccccgcgagcacagagcctcgcctttgccgatccgccgcccgtccacacccgccgccagctcaccatggatgatgatatcgccgcgctcgtcgtcgacaacggctccggcatgtgcaaggccggcttcgcgggcgacgatgccccccgggccgtcttcccctccatcgtggggcgccccaggcaccagggcgtgatggtgggcatgggtcagaaggattcctatgtgggcgacgaggcccagagcaagagaggcatcctcaccctgaagtaccccatcgagcacggcatcgtcaccaactgggacgacatggagaaaatctggcaccacaccttctacaatgagctgcgtgtggctcccgaggagcaccccgtgctgctgaccgaggcccccctgaaccccaaggccaaccgcgagaagatgacccagatcatgtttgagaccttcaacaccccagccatgtacgttgctatccaggctgtgctatccctgtacgcctctggccgtaccactggcatcgtgatggactccggtgacggggtcacccacactgtgcccatctacgaggggtatgccctcccccatgccatcctgcgtctggacctggctggccgggacctgactgactacctcatgaagatcctcaccgagcgcggctacagcttcaccaccacggccgagcgggaaatcgtgcgtgacattaaggagaagctgtgctacgtcgccctggacttcgagcaagagatggccacggctgcttccagctcctccctggagaagagctacgagctgcctgacggccaggtcatcaccattggcaatgagcggttccgctgccctgaggcactcttccagccttccttcctgggcatggagtcctgtggcatccacgaaactaccttcaactccatcatgaagtgtgacgtggacatccgcaaagacctgtacgccaacacagtgctgtctggcggcaccaccatgtaccctggcattgccgacaggatgcagaaggagatcactgccctggcacccagcacaatgaagatcaagatcattgctcctcctgagcgcaagtactccgtgtggatcggcggctccatcctggcctcgctgtccaccttccagcagatgtggatcagcaagcaggagtatgacgagtccggcccctccatcgtccaccgcaaatgcttctaggcggactatgacttagttgcgttacaccctttcttgacaaaacctaacttgcgcagaaaacaagatgagattggcatggctttatttgttttttttgttttgttttggttttttttttttttttggcttgactcaggatttaaaaactggaacggtgaaggtgacagcagtcggttggagcgagcatcccccaaagttcacaatgtggccgaggactttgattgcacattgttgtttttttaatagtcattccaaatatgagatgcgttgttacaggaagtcccttgccatcctaaaagccaccccacttctctctaaggagaatggcccagtcctctcccaagtccacacaggggaggtgatagcattgctttcgtgtaaattatgtaatgcaaaatttttttaatcttcgccttaatacttttttattttgttttattttgaatgatgagccttcgtgcccccccttcccccttttttgtcccccaacttgagatgtatgaaggcttttggtctccctgggagtgggtggaggcagccagggcttacctgtacactgacttgagaccagttgaataaaagtgcacaccttaaaaatgaaccgccgagaccgcgtccgccccgcgagcacagagcctcgcctttgccgatccgccgcccgtccacacccgccgccagctcaccatggatgatgatatcgccgcgctcgtcgtcgacaacggctccggcatgtgcaaggccggcttcgcgggcgacgatgccccccgggccgtcttcccctccatcgtggggcgccccaggcaccagggcgtgatggtgggcatgggtcagaaggattcctatgtgggcgacgaggcccagagcaagagaggcatcctcaccctgaagtaccccatcgagcacggcatcgtcaccaactgggacgacatggagaaaatctggcaccacaccttctacaatgagctgcgtgtggctcccgaggagcaccccgtgctgctgaccgaggcccccctgaaccccaaggccaaccgcgagaagatgacccagatcatgtttgagaccttcaacaccccagccatgtacgttgctatccaggctgtgctatccctgtacgcctctggccgtaccactggcatcgtgatggactccggtgacggggtcacccacactgtgcccatctacgaggggtatgccctcccccatgccatcctgcgtctggacctggctggccgggacctgactgactacctcatgaagatcctcaccgagcgcggctacagcttcaccaccacggccgagcgggaaatcgtgcgtgacattaaggagaagctgtgctacgtcgccctggacttcgagcaagagatggccacggctgcttccagctcctccctggagaagagctacgagctgcctgacggccaggtcatcaccattggcaatgagcggttccgctgccctgaggcactcttccagccttccttcctgggcatggagtcctgtggcatccacgaaactaccttcaactccatcatgaagtgtgacgtggacatccgcaaagacctgtacgccaacacagtgctgtctggcggcaccaccatgtaccctggcattgccgacaggatgcagaaggagatcactgccctggcacccagcacaatgaagatcaagatcattgctcctcctgagcgcaagtactccgtgtggatcggcggctccatcctggcctcgctgtccaccttccagcagatgtggatcagcaagcaggagtatgacgagtccggcccctccatcgtccaccgcaaatgcttctaggcggactatgacttagttgcgttacaccctttcttgacaaaacctaacttgcgcagaaaacaagatgagattggcatggctttatttgttttttttgttttgttttggttttttttttttttttggcttgactcaggatttaaaaactggaacggtgaaggtgacagcagtcggttggagcgagcatcccccaaagttcacaatgtggccgaggactttgattgcacattgttgtttttttaatagtcattccaaatatgagatgcgttgttacaggaagtcccttgccatcctaaaagccaccccacttctctctaaggagaatggcccagtcctctcccaagtccacacaggggaggtgatagcattgctttcgtgtaaattatgtaatgcaaaatttttttaatcttcgccttaatacttttttattttgttttattttgaatgatgagccttcgtgcccccccttcccccttttttgtcccccaacttgagatgtatgaaggcttttggtctccctgggagtgggtggaggcagccagggcttacctgtacactgacttgagaccagttgaataaaagtgcacaccttaaaaatgaaccgccgagaccgcgtccgccccgcgagcacagagcctcgcctttgccgatccgccgcccgtccacacccgccgccagctcaccatggatgatgatatcgccgcgctcgtcgtcgacaacggctccggcatgtgcaaggccggcttcgcgggcgacgatgccccccgggccgtcttcccctccatcgtggggcgccccaggcaccagggcgtgatggtgggcatgggtcagaaggattcctatgtgggcgacgaggcccagagcaagagaggcatcctcaccctgaagtaccccatcgagcacggcatcgtcaccaactgggacgacatggagaaaatctggcaccacaccttctacaatgagctgcgtgtggctcccgaggagcaccccgtgctgctgaccgaggcccccctgaaccccaaggccaaccgcgagaagatgacccagatcatgtttgagaccttcaacaccccagccatgtacgttgctatccaggctgtgctatccctgtacgcctctggccgtaccactggcatcgtgatggactccggtgacggggtcacccacactgtgcccatctacgaggggtatgccctcccccatgccatcctgcgtctggacctggctggccgggacctgactgactacctcatgaagatcctcaccgagcgcggctacagcttcaccaccacggccgagcgggaaatcgtgcgtgacattaaggagaagctgtgctacgtcgccctggacttcgagcaagagatggccacggctgcttccagctcctccctggagaagagctacgagctgcctgacggccaggtcatcaccattggcaatgagcggttccgctgccctgaggcactcttccagccttccttcctgggcatggagtcctgtggcatccacgaaactaccttcaactccatcatgaagtgtgacgtggacatccgcaaagacctgtacgccaacacagtgctgtctggcggcaccaccatgtaccctggcattgccgacaggatgcagaaggagatcactgccctggcacccagcacaatgaagatcaagatcattgctcctcctgagcgcaagtactccgtgtggatcggcggctccatcctggcctcgctgtccaccttccagcagatgtggatcagcaagcaggagtatgacgagtccggcccctccatcgtccaccgcaaatgcttctaggcggactatgacttagttgcgttacaccctttcttgacaaaacctaacttgcgcagaaaacaagatgagattggcatggctttatttgttttttttgttttgttttggttttttttttttttttggcttgactcaggatttaaaaactggaacggtgaaggtgacagcagtcggttggagcgagcatcccccaaagttcacaatgtggccgaggactttgattgcacattgttgtttttttaatagtcattccaaatatgagatgcgttgttacaggaagtcccttgccatcctaaaagccaccccacttctctctaaggagaatggcccagtcctctcccaagtccacacaggggaggtgatagcattgctttcgtgtaaattatgtaatgcaaaatttttttaatcttcgccttaatacttttttattttgttttattttgaatgatgagccttcgtgcccccccttcccccttttttgtcccccaacttgagatgtatgaaggcttttggtctccctgggagtgggtggaggcagccagggcttacctgtacactgacttgagaccagttgaataaaagtgcacaccttaaaaatgaaccgccgagaccgcgtccgccccgcgagcacagagcctcgcctttgccgatccgccgcccgtccacacccgccgccagctcaccatggatgatgatatcgccgcgctcgtcgtcgacaacggctccggcatgtgcaaggccggcttcgcgggcgacgatgccccccgggccgtcttcccctccatcgtggggcgccccaggcaccagggcgtgatggtgggcatgggtcagaaggattcctatgtgggcgacgaggcccagagcaagagaggcatcctcaccctgaagtaccccatcgagcacggcatcgtcaccaactgggacgacatggagaaaatctggcaccacaccttctacaatgagctgcgtgtggctcccgaggagcaccccgtgctgctgaccgaggcccccctgaaccccaaggccaaccgcgagaagatgacccagatcatgtttgagaccttcaacaccccagccatgtacgttgctatccaggctgtgctatccctgtacgcctctggccgtaccactggcatcgtgatggactccggtgacggggtcacccacactgtgcccatctacgaggggtatgccctcccccatgccatcctgcgtctggacctggctggccgggacctgactgactacctcatgaagatcctcaccgagcgcggctacagcttcaccaccacggccgagcgggaaatcgtgcgtgacattaaggagaagctgtgctacgtcgccctggacttcgagcaagagatggccacggctgcttccagctcctccctggagaagagctacgagctgcctgacggccaggtcatcaccattggcaatgagcggttccgctgccctgaggcactcttccagccttccttcctgggcatggagtcctgtggcatccacgaaactaccttcaactccatcatgaagtgtgacgtggacatccgcaaagacctgtacgccaacacagtgctgtctggcggcaccaccatgtaccctggcattgccgacaggatgcagaaggagatcactgccctggcacccagcacaatgaagatcaagatcattgctcctcctgagcgcaagtactccgtgtggatcggcggctccatcctggcctcgctgtccaccttccagcagatgtggatcagcaagcaggagtatgacgagtccggcccctccatcgtccaccgcaaatgcttctaggcggactatgacttagttgcgttacaccctttcttgacaaaacctaacttgcgcagaaaacaagatgagattggcatggctttatttgttttttttgttttgttttggttttttttttttttttggcttgactcaggatttaaaaactggaacggtgaaggtgacagcagtcggttggagcgagcatcccccaaagttcacaatgtggccgaggactttgattgcacattgttgtttttttaatagtcattccaaatatgagatgcgttgttacaggaagtcccttgccatcctaaaagccaccccacttctctctaaggagaatggcccagtcctctcccaagtccacacaggggaggtgatagcattgctttcgtgtaaattatgtaatgcaaaatttttttaatcttcgccttaatacttttttattttgttttattttgaatgatgagccttcgtgcccccccttcccccttttttgtcccccaacttgagatgtatgaaggcttttggtctccctgggagtgggtggaggcagccagggcttacctgtacactgacttgagaccagttgaataaaagtgcacaccttaaaaatgaaccgccgagaccgcgtccgccccgcgagcacagagcctcgcctttgccgatccgccgcccgtccacacccgccgccagctcaccatggatgatgatatcgccgcgctcgtcgtcgacaacggctccggcatgtgcaaggccggcttcgcgggcgacgatgccccccgggccgtcttcccctccatcgtggggcgccccaggcaccagggcgtgatggtgggcatgggtcagaaggattcctatgtgggcgacgaggcccagagcaagagaggcatcctcaccctgaagtaccccatcgagcacggcatcgtcaccaactgggacgacatggagaaaatctggcaccacaccttctacaatgagctgcgtgtggctcccgaggagcaccccgtgctgctgaccgaggcccccctgaaccccaaggccaaccgcgagaagatgacccagatcatgtttgagaccttcaacaccccagccatgtacgttgctatccaggctgtgctatccctgtacgcctctggccgtaccactggcatcgtgatggactccggtgacggggtcacccacactgtgcccatctacgaggggtatgccctcccccatgccatcctgcgtctggacctggctggccgggacctgactgactacctcatgaagatcctcaccgagcgcggctacagcttcaccaccacggccgagcgggaaatcgtgcgtgacattaaggagaagctgtgctacgtcgccctggacttcgagcaagagatggccacggctgcttccagctcctccctggagaagagctacgagctgcctgacggccaggtcatcaccattggcaatgagcggttccgctgccctgaggcactcttccagccttccttcctgggcatggagtcctgtggcatccacgaaactaccttcaactccatcatgaagtgtgacgtggacatccgcaaagacctgtacgccaacacagtgctgtctggcggcaccaccatgtaccctggcattgccgacaggatgcagaaggagatcactgccctggcacccagcacaatgaagatcaagatcattgctcctcctgagcgcaagtactccgtgtggatcggcggctccatcctggcctcgctgtccaccttccagcagatgtggatcagcaagcaggagtatgacgagtccggcccctccatcgtccaccgcaaatgcttctaggcggactatgacttagttgcgttacaccctttcttgacaaaacctaacttgcgcagaaaacaagatgagattggcatggctttatttgttttttttgttttgttttggttttttttttttttttggcttgactcaggatttaaaaactggaacggtgaaggtgacagcagtcggttggagcgagcatcccccaaagttcacaatgtggccgaggactttgattgcacattgttgtttttttaatagtcattccaaatatgagatgcgttgttacaggaagtcccttgccatcctaaaagccaccccacttctctctaaggagaatggcccagtcctctcccaagtccacacaggggaggtgatagcattgctttcgtgtaaattatgtaatgcaaaatttttttaatcttcgccttaatacttttttattttgttttattttgaatgatgagccttcgtgcccccccttcccccttttttgtcccccaacttgagatgtatgaaggcttttggtctccctgggagtgggtggaggcagccagggcttacctgtacactgacttgagaccagttgaataaaagtgcacaccttaaaaatgaaccgccgagaccgcgtccgccccgcgagcacagagcctcgcctttgccgatccgccgcccgtccacacccgccgccagctcaccatggatgatgatatcgccgcgctcgtcgtcgacaacggctccggcatgtgcaaggccggcttcgcgggcgacgatgccccccgggccgtcttcccctccatcgtggggcgccccaggcaccagggcgtgatggtgggcatgggtcagaaggattcctatgtgggcgacgaggcccagagcaagagaggcatcctcaccctgaagtaccccatcgagcacggcatcgtcaccaactgggacgacatggagaaaatctggcaccacaccttctacaatgagctgcgtgtggctcccgaggagcaccccgtgctgctgaccgaggcccccctgaaccccaaggccaaccgcgagaagatgacccagatcatgtttgagaccttcaacaccccagccatgtacgttgctatccaggctgtgctatccctgtacgcctctggccgtaccactggcatcgtgatggactccggtgacggggtcacccacactgtgcccatctacgaggggtatgccctcccccatgccatcctgcgtctggacctggctggccgggacctgactgactacctcatgaagatcctcaccgagcgcggctacagcttcaccaccacggccgagcgggaaatcgtgcgtgacattaaggagaagctgtgctacgtcgccctggacttcgagcaagagatggccacggctgcttccagctcctccctggagaagagctacgagctgcctgacggccaggtcatcaccattggcaatgagcggttccgctgccctgaggcactcttccagccttccttcctgggcatggagtcctgtggcatccacgaaactaccttcaactccatcatgaagtgtgacgtggacatccgcaaagacctgtacgccaacacagtgctgtctggcggcaccaccatgtaccctggcattgccgacaggatgcagaaggagatcactgccctggcacccagcacaatgaagatcaagatcattgctcctcctgagcgcaagtactccgtgtggatcggcggctccatcctggcctcgctgtccaccttccagcagatgtggatcagcaagcaggagtatgacgagtccggcccctccatcgtccaccgcaaatgcttctaggcggactatgacttagttgcgttacaccctttcttgacaaaacctaacttgcgcagaaaacaagatgagattggcatggctttatttgttttttttgttttgttttggttttttttttttttttggcttgactcaggatttaaaaactggaacggtgaaggtgacagcagtcggttggagcgagcatcccccaaagttcacaatgtggccgaggactttgattgcacattgttgtttttttaatagtcattccaaatatgagatgcgttgttacaggaagtcccttgccatcctaaaagccaccccacttctctctaaggagaatggcccagtcctctcccaagtccacacaggggaggtgatagcattgctttcgtgtaaattatgtaatgcaaaatttttttaatcttcgccttaatacttttttattttgttttattttgaatgatgagccttcgtgcccccccttcccccttttttgtcccccaacttgagatgtatgaaggcttttggtctccctgggagtgggtggaggcagccagggcttacctgtacactgacttgagaccagttgaataaaagtgcacaccttaaaaatgaaccgccgagaccgcgtccgccccgcgagcacagagcctcgcctttgccgatccgccgcccgtccacacccgccgccagctcaccatggatgatgatatcgccgcgctcgtcgtcgacaacggctccggcatgtgcaaggccggcttcgcgggcgacgatgccccccgggccgtcttcccctccatcgtggggcgccccaggcaccagggcgtgatggtgggcatgggtcagaaggattcctatgtgggcgacgaggcccagagcaagagaggcatcctcaccctgaagtaccccatcgagcacggcatcgtcaccaactgggacgacatggagaaaatctggcaccacaccttctacaatgagctgcgtgtggctcccgaggagcaccccgtgctgctgaccgaggcccccctgaaccccaaggccaaccgcgagaagatgacccagatcatgtttgagaccttcaacaccccagccatgtacgttgctatccaggctgtgctatccctgtacgcctctggccgtaccactggcatcgtgatggactccggtgacggggtcacccacactgtgcccatctacgaggggtatgccctcccccatgccatcctgcgtctggacctggctggccgggacctgactgactacctcatgaagatcctcaccgagcgcggctacagcttcaccaccacggccgagcgggaaatcgtgcgtgacattaaggagaagctgtgctacgtcgccctggacttcgagcaagagatggccacggctgcttccagctcctccctggagaagagctacgagctgcctgacggccaggtcatcaccattggcaatgagcggttccgctgccctgaggcactcttccagccttccttcctgggcatggagtcctgtggcatccacgaaactaccttcaactccatcatgaagtgtgacgtggacatccgcaaagacctgtacgccaacacagtgctgtctggcggcaccaccatgtaccctggcattgccgacaggatgcagaaggagatcactgccctggcacccagcacaatgaagatcaagatcattgctcctcctgagcgcaagtactccgtgtggatcggcggctccatcctggcctcgctgtccaccttccagcagatgtggatcagcaagcaggagtatgacgagtccggcccctccatcgtccaccgcaaatgcttctaggcggactatgacttagttgcgttacaccctttcttgacaaaacctaacttgcgcagaaaacaagatgagattggcatggctttatttgttttttttgttttgttttggttttttttttttttttggcttgactcaggatttaaaaactggaacggtgaaggtgacagcagtcggttggagcgagcatcccccaaagttcacaatgtggccgaggactttgattgcacattgttgtttttttaatagtcattccaaatatgagatgcgttgttacaggaagtcccttgccatcctaaaagccaccccacttctctctaaggagaatggcccagtcctctcccaagtccacacaggggaggtgatagcattgctttcgtgtaaattatgtaatgcaaaatttttttaatcttcgccttaatacttttttattttgttttattttgaatgatgagccttcgtgcccccccttcccccttttttgtcccccaacttgagatgtatgaaggcttttggtctccctgggagtgggtggaggcagccagggcttacctgtacactgacttgagaccagttgaataaaagtgcacaccttaaaaatgaaccgccgagaccgcgtccgccccgcgagcacagagcctcgcctttgccgatccgccgcccgtccacacccgccgccagctcaccatggatgatgatatcgccgcgctcgtcgtcgacaacggctccggcatgtgcaaggccggcttcgcgggcgacgatgccccccgggccgtcttcccctccatcgtggggcgccccaggcaccagggcgtgatggtgggcatgggtcagaaggattcctatgtgggcgacgaggcccagagcaagagaggcatcctcaccctgaagtaccccatcgagcacggcatcgtcaccaactgggacgacatggagaaaatctggcaccacaccttctacaatgagctgcgtgtggctcccgaggagcaccccgtgctgctgaccgaggcccccctgaaccccaaggccaaccgcgagaagatgacccagatcatgtttgagaccttcaacaccccagccatgtacgttgctatccaggctgtgctatccctgtacgcctctggccgtaccactggcatcgtgatggactccggtgacggggtcacccacactgtgcccatctacgaggggtatgccctcccccatgccatcctgcgtctggacctggctggccgggacctgactgactacctcatgaagatcctcaccgagcgcggctacagcttcaccaccacggccgagcgggaaatcgtgcgtgacattaaggagaagctgtgctacgtcgccctggacttcgagcaagagatggccacggctgcttccagctcctccctggagaagagctacgagctgcctgacggccaggtcatcaccattggcaatgagcggttccgctgccctgaggcactcttccagccttccttcctgggcatggagtcctgtggcatccacgaaactaccttcaactccatcatgaagtgtgacgtggacatccgcaaagacctgtacgccaacacagtgctgtctggcggcaccaccatgtaccctggcattgccgacaggatgcagaaggagatcactgccctggcacccagcacaatgaagatcaagatcattgctcctcctgagcgcaagtactccgtgtggatcggcggctccatcctggcctcgctgtccaccttccagcagatgtggatcagcaagcaggagtatgacgagtccggcccctccatcgtccaccgcaaatgcttctaggcggactatgacttagttgcgttacaccctttcttgacaaaacctaacttgcgcagaaaacaagatgagattggcatggctttatttgttttttttgttttgttttggttttttttttttttttggcttgactcaggatttaaaaactggaacggtgaaggtgacagcagtcggttggagcgagcatcccccaaagttcacaatgtggccgaggactttgattgcacattgttgtttttttaatagtcattccaaatatgagatgcgttgttacaggaagtcccttgccatcctaaaagccaccccacttctctctaaggagaatggcccagtcctctcccaagtccacacaggggaggtgatagcattgctttcgtgtaaattatgtaatgcaaaatttttttaatcttcgccttaatacttttttattttgttttattttgaatgatgagccttcgtgcccccccttcccccttttttgtcccccaacttgagatgtatgaaggcttttggtctccctgggagtgggtggaggcagccagggcttacctgtacactgacttgagaccagttgaataaaagtgcacaccttaaaaatgaaccgccgagaccgcgtccgccccgcgagcacagagcctcgcctttgccgatccgccgcccgtccacacccgccgccagctcaccatggatgatgatatcgccgcgctcgtcgtcgacaacggctccggcatgtgcaaggccggcttcgcgggcgacgatgccccccgggccgtcttcccctccatcgtggggcgccccaggcaccagggcgtgatggtgggcatgggtcagaaggattcctatgtgggcgacgaggcccagagcaagagaggcatcctcaccctgaagtaccccatcgagcacggcatcgtcaccaactgggacgacatggagaaaatctggcaccacaccttctacaatgagctgcgtgtggctcccgaggagcaccccgtgctgctgaccgaggcccccctgaaccccaaggccaaccgcgagaagatgacccagatcatgtttgagaccttcaacaccccagccatgtacgttgctatccaggctgtgctatccctgtacgcctctggccgtaccactggcatcgtgatggactccggtgacggggtcacccacactgtgcccatctacgaggggtatgccctcccccatgccatcctgcgtctggacctggctggccgggacctgactgactacctcatgaagatcctcaccgagcgcggctacagcttcaccaccacggccgagcgggaaatcgtgcgtgacattaaggagaagctgtgctacgtcgccctggacttcgagcaagagatggccacggctgcttccagctcctccctggagaagagctacgagctgcctgacggccaggtcatcaccattggcaatgagcggttccgctgccctgaggcactcttccagccttccttcctgggcatggagtcctgtggcatccacgaaactaccttcaactccatcatgaagtgtgacgtggacatccgcaaagacctgtacgccaacacagtgctgtctggcggcaccaccatgtaccctggcattgccgacaggatgcagaaggagatcactgccctggcacccagcacaatgaagatcaagatcattgctcctcctgagcgcaagtactccgtgtggatcggcggctccatcctggcctcgctgtccaccttccagcagatgtggatcagcaagcaggagtatgacgagtccggcccctccatcgtccaccgcaaatgcttctaggcggactatgacttagttgcgttacaccctttcttgacaaaacctaacttgcgcagaaaacaagatgagattggcatggctttatttgttttttttgttttgttttggttttttttttttttttggcttgactcaggatttaaaaactggaacggtgaaggtgacagcagtcggttggagcgagcatcccccaaagttcacaatgtggccgaggactttgattgcacattgttgtttttttaatagtcattccaaatatgagatgcgttgttacaggaagtcccttgccatcctaaaagccaccccacttctctctaaggagaatggcccagtcctctcccaagtccacacaggggaggtgatagcattgctttcgtgtaaattatgtaatgcaaaatttttttaatcttcgccttaatacttttttattttgttttattttgaatgatgagccttcgtgcccccccttcccccttttttgtcccccaacttgagatgtatgaaggcttttggtctccctgggagtgggtggaggcagccagggcttacctgtacactgacttgagaccagttgaataaaagtgcacaccttaaaaatgaaccgccgagaccgcgtccgccccgcgagcacagagcctcgcctttgccgatccgccgcccgtccacacccgccgccagctcaccatggatgatgatatcgccgcgctcgtcgtcgacaacggctccggcatgtgcaaggccggcttcgcgggcgacgatgccccccgggccgtcttcccctccatcgtggggcgccccaggcaccagggcgtgatggtgggcatgggtcagaaggattcctatgtgggcgacgaggcccagagcaagagaggcatcctcaccctgaagtaccccatcgagcacggcatcgtcaccaactgggacgacatggagaaaatctggcaccacaccttctacaatgagctgcgtgtggctcccgaggagcaccccgtgctgctgaccgaggcccccctgaaccccaaggccaaccgcgagaagatgacccagatcatgtttgagaccttcaacaccccagccatgtacgttgctatccaggctgtgctatccctgtacgcctctggccgtaccactggcatcgtgatggactccggtgacggggtcacccacactgtgcccatctacgaggggtatgccctcccccatgccatcctgcgtctggacctggctggccgggacctgactgactacctcatgaagatcctcaccgagcgcggctacagcttcaccaccacggccgagcgggaaatcgtgcgtgacattaaggagaagctgtgctacgtcgccctggacttcgagcaagagatggccacggctgcttccagctcctccctggagaagagctacgagctgcctgacggccaggtcatcaccattggcaatgagcggttccgctgccctgaggcactcttccagccttccttcctgggcatggagtcctgtggcatccacgaaactaccttcaactccatcatgaagtgtgacgtggacatccgcaaagacctgtacgccaacacagtgctgtctggcggcaccaccatgtaccctggcattgccgacaggatgcagaaggagatcactgccctggcacccagcacaatgaagatcaagatcattgctcctcctgagcgcaagtactccgtgtggatcggcggctccatcctggcctcgctgtccaccttccagcagatgtggatcagcaagcaggagtatgacgagtccggcccctccatcgtccaccgcaaatgcttctaggcggactatgacttagttgcgttacaccctttcttgacaaaacctaacttgcgcagaaaacaagatgagattggcatggctttatttgttttttttgttttgttttggttttttttttttttttggcttgactcaggatttaaaaactggaacggtgaaggtgacagcagtcggttggagcgagcatcccccaaagttcacaatgtggccgaggactttgattgcacattgttgtttttttaatagtcattccaaatatgagatgcgttgttacaggaagtcccttgccatcctaaaagccaccccacttctctctaaggagaatggcccagtcctctcccaagtccacacaggggaggtgatagcattgctttcgtgtaaattatgtaatgcaaaatttttttaatcttcgccttaatacttttttattttgttttattttgaatgatgagccttcgtgcccccccttcccccttttttgtcccccaacttgagatgtatgaaggcttttggtctccctgggagtgggtggaggcagccagggcttacctgtacactgacttgagaccagttgaataaaagtgcacaccttaaaaatgaaccgccgagaccgcgtccgccccgcgagcacagagcctcgcctttgccgatccgccgcccgtccacacccgccgccagctcaccatggatgatgatatcgccgcgctcgtcgtcgacaacggctccggcatgtgcaaggccggcttcgcgggcgacgatgccccccgggccgtcttcccctccatcgtggggcgccccaggcaccagggcgtgatggtgggcatgggtcagaaggattcctatgtgggcgacgaggcccagagcaagagaggcatcctcaccctgaagtaccccatcgagcacggcatcgtcaccaactgggacgacatggagaaaatctggcaccacaccttctacaatgagctgcgtgtggctcccgaggagcaccccgtgctgctgaccgaggcccccctgaaccccaaggccaaccgcgagaagatgacccagatcatgtttgagaccttcaacaccccagccatgtacgttgctatccaggctgtgctatccctgtacgcctctggccgtaccactggcatcgtgatggactccggtgacggggtcacccacactgtgcccatctacgaggggtatgccctcccccatgccatcctgcgtctggacctggctggccgggacctgactgactacctcatgaagatcctcaccgagcgcggctacagcttcaccaccacggccgagcgggaaatcgtgcgtgacattaaggagaagctgtgctacgtcgccctggacttcgagcaagagatggccacggctgcttccagctcctccctggagaagagctacgagctgcctgacggccaggtcatcaccattggcaatgagcggttccgctgccctgaggcactcttccagccttccttcctgggcatggagtcctgtggcatccacgaaactaccttcaactccatcatgaagtgtgacgtggacatccgcaaagacctgtacgccaacacagtgctgtctggcggcaccaccatgtaccctggcattgccgacaggatgcagaaggagatcactgccctggcacccagcacaatgaagatcaagatcattgctcctcctgagcgcaagtactccgtgtggatcggcggctccatcctggcctcgctgtccaccttccagcagatgtggatcagcaagcaggagtatgacgagtccggcccctccatcgtccaccgcaaatgcttctaggcggactatgacttagttgcgttacaccctttcttgacaaaacctaacttgcgcagaaaacaagatgagattggcatggctttatttgttttttttgttttgttttggttttttttttttttttggcttgactcaggatttaaaaactggaacggtgaaggtgacagcagtcggttggagcgagcatcccccaaagttcacaatgtggccgaggactttgattgcacattgttgtttttttaatagtcattccaaatatgagatgcgttgttacaggaagtcccttgccatcctaaaagccaccccacttctctctaaggagaatggcccagtcctctcccaagtccacacaggggaggtgatagcattgctttcgtgtaaattatgtaatgcaaaatttttttaatcttcgccttaatacttttttattttgttttattttgaatgatgagccttcgtgcccccccttcccccttttttgtcccccaacttgagatgtatgaaggcttttggtctccctgggagtgggtggaggcagccagggcttacctgtacactgacttgagaccagttgaataaaagtgcacaccttaaaaatgaaccgccgagaccgcgtccgccccgcgagcacagagcctcgcctttgccgatccgccgcccgtccacacccgccgccagctcaccatggatgatgatatcgccgcgctcgtcgtcgacaacggctccggcatgtgcaaggccggcttcgcgggcgacgatgccccccgggccgtcttcccctccatcgtggggcgccccaggcaccagggcgtgatggtgggcatgggtcagaaggattcctatgtgggcgacgaggcccagagcaagagaggcatcctcaccctgaagtaccccatcgagcacggcatcgtcaccaactgggacgacatggagaaaatctggcaccacaccttctacaatgagctgcgtgtggctcccgaggagcaccccgtgctgctgaccgaggcccccctgaaccccaaggccaaccgcgagaagatgacccagatcatgtttgagaccttcaacaccccagccatgtacgttgctatccaggctgtgctatccctgtacgcctctggccgtaccactggcatcgtgatggactccggtgacggggtcacccacactgtgcccatctacgaggggtatgccctcccccatgccatcctgcgtctggacctggctggccgggacctgactgactacctcatgaagatcctcaccgagcgcggctacagcttcaccaccacggccgagcgggaaatcgtgcgtgacattaaggagaagctgtgctacgtcgccctggacttcgagcaagagatggccacggctgcttccagctcctccctggagaagagctacgagctgcctgacggccaggtcatcaccattggcaatgagcggttccgctgccctgaggcactcttccagccttccttcctgggcatggagtcctgtggcatccacgaaactaccttcaactccatcatgaagtgtgacgtggacatccgcaaagacctgtacgccaacacagtgctgtctggcggcaccaccatgtaccctggcattgccgacaggatgcagaaggagatcactgccctggcacccagcacaatgaagatcaagatcattgctcctcctgagcgcaagtactccgtgtggatcggcggctccatcctggcctcgctgtccaccttccagcagatgtggatcagcaagcaggagtatgacgagtccggcccctccatcgtccaccgcaaatgcttctaggcggactatgacttagttgcgttacaccctttcttgacaaaacctaacttgcgcagaaaacaagatgagattggcatggctttatttgttttttttgttttgttttggttttttttttttttttggcttgactcaggatttaaaaactggaacggtgaaggtgacagcagtcggttggagcgagcatcccccaaagttcacaatgtggccgaggactttgattgcacattgttgtttttttaatagtcattccaaatatgagatgcgttgttacaggaagtcccttgccatcctaaaagccaccccacttctctctaaggagaatggcccagtcctctcccaagtccacacaggggaggtgatagcattgctttcgtgtaaattatgtaatgcaaaatttttttaatcttcgccttaatacttttttattttgttttattttgaatgatgagccttcgtgcccccccttcccccttttttgtcccccaacttgagatgtatgaaggcttttggtctccctgggagtgggtggaggcagccagggcttacctgtacactgacttgagaccagttgaataaaagtgcacaccttaaaaatgaaccgccgagaccgcgtccgccccgcgagcacagagcctcgcctttgccgatccgccgcccgtccacacccgccgccagctcaccatggatgatgatatcgccgcgctcgtcgtcgacaacggctccggcatgtgcaaggccggcttcgcgggcgacgatgccccccgggccgtcttcccctccatcgtggggcgccccaggcaccagggcgtgatggtgggcatgggtcagaaggattcctatgtgggcgacgaggcccagagcaagagaggcatcctcaccctgaagtaccccatcgagcacggcatcgtcaccaactgggacgacatggagaaaatctggcaccacaccttctacaatgagctgcgtgtggctcccgaggagcaccccgtgctgctgaccgaggcccccctgaaccccaaggccaaccgcgagaagatgacccagatcatgtttgagaccttcaacaccccagccatgtacgttgctatccaggctgtgctatccctgtacgcctctggccgtaccactggcatcgtgatggactccggtgacggggtcacccacactgtgcccatctacgaggggtatgccctcccccatgccatcctgcgtctggacctggctggccgggacctgactgactacctcatgaagatcctcaccgagcgcggctacagcttcaccaccacggccgagcgggaaatcgtgcgtgacattaaggagaagctgtgctacgtcgccctggacttcgagcaagagatggccacggctgcttccagctcctccctggagaagagctacgagctgcctgacggccaggtcatcaccattggcaatgagcggttccgctgccctgaggcactcttccagccttccttcctgggcatggagtcctgtggcatccacgaaactaccttcaactccatcatgaagtgtgacgtggacatccgcaaagacctgtacgccaacacagtgctgtctggcggcaccaccatgtaccctggcattgccgacaggatgcagaaggagatcactgccctggcacccagcacaatgaagatcaagatcattgctcctcctgagcgcaagtactccgtgtggatcggcggctccatcctggcctcgctgtccaccttccagcagatgtggatcagcaagcaggagtatgacgagtccggcccctccatcgtccaccgcaaatgcttctaggcggactatgacttagttgcgttacaccctttcttgacaaaacctaacttgcgcagaaaacaagatgagattggcatggctttatttgttttttttgttttgttttggttttttttttttttttggcttgactcaggatttaaaaactggaacggtgaaggtgacagcagtcggttggagcgagcatcccccaaagttcacaatgtggccgaggactttgattgcacattgttgtttttttaatagtcattccaaatatgagatgcgttgttacaggaagtcccttgccatcctaaaagccaccccacttctctctaaggagaatggcccagtcctctcccaagtccacacaggggaggtgatagcattgctttcgtgtaaattatgtaatgcaaaatttttttaatcttcgccttaatacttttttattttgttttattttgaatgatgagccttcgtgcccccccttcccccttttttgtcccccaacttgagatgtatgaaggcttttggtctccctgggagtgggtggaggcagccagggcttacctgtacactgacttgagaccagttgaataaaagtgcacaccttaaaaatgaaccgccgagaccgcgtccgccccgcgagcacagagcctcgcctttgccgatccgccgcccgtccacacccgccgccagctcaccatggatgatgatatcgccgcgctcgtcgtcgacaacggctccggcatgtgcaaggccggcttcgcgggcgacgatgccccccgggccgtcttcccctccatcgtggggcgccccaggcaccagggcgtgatggtgggcatgggtcagaaggattcctatgtgggcgacgaggcccagagcaagagaggcatcctcaccctgaagtaccccatcgagcacggcatcgtcaccaactgggacgacatggagaaaatctggcaccacaccttctacaatgagctgcgtgtggctcccgaggagcaccccgtgctgctgaccgaggcccccctgaaccccaaggccaaccgcgagaagatgacccagatcatgtttgagaccttcaacaccccagccatgtacgttgctatccaggctgtgctatccctgtacgcctctggccgtaccactggcatcgtgatggactccggtgacggggtcacccacactgtgcccatctacgaggggtatgccctcccccatgccatcctgcgtctggacctggctggccgggacctgactgactacctcatgaagatcctcaccgagcgcggctacagcttcaccaccacggccgagcgggaaatcgtgcgtgacattaaggagaagctgtgctacgtcgccctggacttcgagcaagagatggccacggctgcttccagctcctccctggagaagagctacgagctgcctgacggccaggtcatcaccattggcaatgagcggttccgctgccctgaggcactcttccagccttccttcctgggcatggagtcctgtggcatccacgaaactaccttcaactccatcatgaagtgtgacgtggacatccgcaaagacctgtacgccaacacagtgctgtctggcggcaccaccatgtaccctggcattgccgacaggatgcagaaggagatcactgccctggcacccagcacaatgaagatcaagatcattgctcctcctgagcgcaagtactccgtgtggatcggcggctccatcctggcctcgctgtccaccttccagcagatgtggatcagcaagcaggagtatgacgagtccggcccctccatcgtccaccgcaaatgcttctaggcggactatgacttagttgcgttacaccctttcttgacaaaacctaacttgcgcagaaaacaagatgagattggcatggctttatttgttttttttgttttgttttggttttttttttttttttggcttgactcaggatttaaaaactggaacggtgaaggtgacagcagtcggttggagcgagcatcccccaaagttcacaatgtggccgaggactttgattgcacattgttgtttttttaatagtcattccaaatatgagatgcgttgttacaggaagtcccttgccatcctaaaagccaccccacttctctctaaggagaatggcccagtcctctcccaagtccacacaggggaggtgatagcattgctttcgtgtaaattatgtaatgcaaaatttttttaatcttcgccttaatacttttttattttgttttattttgaatgatgagccttcgtgcccccccttcccccttttttgtcccccaacttgagatgtatgaaggcttttggtctccctgggagtgggtggaggcagccagggcttacctgtacactgacttgagaccagttgaataaaagtgcacaccttaaaaatgaaccgccgagaccgcgtccgccccgcgagcacagagcctcgcctttgccgatccgccgcccgtccacacccgccgccagctcaccatggatgatgatatcgccgcgctcgtcgtcgacaacggctccggcatgtgcaaggccggcttcgcgggcgacgatgccccccgggccgtcttcccctccatcgtggggcgccccaggcaccagggcgtgatggtgggcatgggtcagaaggattcctatgtgggcgacgaggcccagagcaagagaggcatcctcaccctgaagtaccccatcgagcacggcatcgtcaccaactgggacgacatggagaaaatctggcaccacaccttctacaatgagctgcgtgtggctcccgaggagcaccccgtgctgctgaccgaggcccccctgaaccccaaggccaaccgcgagaagatgacccagatcatgtttgagaccttcaacaccccagccatgtacgttgctatccaggctgtgctatccctgtacgcctctggccgtaccactggcatcgtgatggactccggtgacggggtcacccacactgtgcccatctacgaggggtatgccctcccccatgccatcctgcgtctggacctggctggccgggacctgactgactacctcatgaagatcctcaccgagcgcggctacagcttcaccaccacggccgagcgggaaatcgtgcgtgacattaaggagaagctgtgctacgtcgccctggacttcgagcaagagatggccacggctgcttccagctcctccctggagaagagctacgagctgcctgacggccaggtcatcaccattggcaatgagcggttccgctgccctgaggcactcttccagccttccttcctgggcatggagtcctgtggcatccacgaaactaccttcaactccatcatgaagtgtgacgtggacatccgcaaagacctgtacgccaacacagtgctgtctggcggcaccaccatgtaccctggcattgccgacaggatgcagaaggagatcactgccctggcacccagcacaatgaagatcaagatcattgctcctcctgagcgcaagtactccgtgtggatcggcggctccatcctggcctcgctgtccaccttccagcagatgtggatcagcaagcaggagtatgacgagtccggcccctccatcgtccaccgcaaatgcttctaggcggactatgacttagttgcgttacaccctttcttgacaaaacctaacttgcgcagaaaacaagatgagattggcatggctttatttgttttttttgttttgttttggttttttttttttttttggcttgactcaggatttaaaaactggaacggtgaaggtgacagcagtcggttggagcgagcatcccccaaagttcacaatgtggccgaggactttgattgcacattgttgtttttttaatagtcattccaaatatgagatgcgttgttacaggaagtcccttgccatcctaaaagccaccccacttctctctaaggagaatggcccagtcctctcccaagtccacacaggggaggtgatagcattgctttcgtgtaaattatgtaatgcaaaatttttttaatcttcgccttaatacttttttattttgttttattttgaatgatgagccttcgtgcccccccttcccccttttttgtcccccaacttgagatgtatgaaggcttttggtctccctgggagtgggtggaggcagccagggcttacctgtacactgacttgagaccagttgaataaaagtgcacaccttaaaaatgaaccgccgagaccgcgtccgccccgcgagcacagagcctcgcctttgccgatccgccgcccgtccacacccgccgccagctcaccatggatgatgatatcgccgcgctcgtcgtcgacaacggctccggcatgtgcaaggccggcttcgcgggcgacgatgccccccggg

SEQ ID NO: 956 - DNA, 4109 bp, Homo sapiens
  misc_feature (333)..(333): second gene starts at position 333
agatgccacgccccatagctccaccagtcaccgcggcacagtggcccttaagcgaggagcggcggcgcccgcagcaatcacagcagtgccgacgtcgtgggtgtttggtgtgaggctgcgagccgccgcgagttctcacggtcccgccggcgccaccaccgcggtcactcaccgccgccgccgccaccactgccaccacggtcgcctgccacagggtcttactctgttgcccaggctggagtgcagtggcacaatcttggctcactgcaacctctgcctcccgggttcaagcaattctcctgcctcagcctcccgagtagctgggattacaggatgatgatgctgaagctatccttgctgcagacttcgaaattggtcactttttacgtgagcgtataatcccaagatcagtgttatattttactggagaagctattgaagatgatgatgatgattatgatgaagaaggtgaagaagcggatgaggaaggggaagaagaaggagatgaggaaaatgatccagactatgacccaaagaaggatcaaaacccagcagagtgcaagcagcagtgaagcaggatgtatgtggccttgaggataacctgcactgtaatagcctaaacacaactcttatttacttacagccttatgtttttgtattttcttggtagactaggtaatttttttttaaaggacaggaaactgatattttaaagaccaatttgttctacctagcattttaactagtttttctgccagctatgttgaatgcacaaattctgtcacgcatgttcattcattgctacataatttggttcttctggaatatttttatgtagctcttggagtacagctatgaaaattaacaactgttaaaggaaataccttttttttttttttgtaattttttccttgaagaaccaaagtattttttcagctggttgttgaatagggttaagtccgcttggattagctgtgcctttcattactttgttacagaaatgcagtgacttatactaagacaatttattgtttaaaaaaaaaattggcaagacaactatatggttaagaatttccagtatgaccacacccaataactgttattagagtgttaatggattattgtgttttaggtgacatagttaactgtaaagtaacctgactcagtatagttactggtaccacagtgaggtgaataaaacgggattttcagaagttagcctgaatttaactgtatttttaaatttaacctccattaactaagcatcttttctttgtggtagggtctaccttctgcttccctggaaaggatgaatttacatcatttgacaagcctattttcaagttatttgttgtttgtttgcttgtttttgtttttgcagctaaaataaaaatttcaaatacaattttagttcttacaagataatgtcttaattttgtaccaattcaggtagaagtagaggcctaccttgaattaagggttatactcagtttttaacacattgttgaagaaaaggtaccagctttggaacgagatgctatactaataagcaagtgtaaaaaaaaaaaaaaaagaggaagaaaatcttaagtgattgatgctgttttcttttaaaaaaaaaaaaaaaaattcattttctttgggttagagctagagagaaggccccaagcttctatggtttcttctaattcttattgcttaaagtatgagtatgtcacttacccgtgcttctgtttactgtgtaattaaaatgggtagtactgtttacctaactacctcatggatgtgttaaggcatattgagttaaatctcatataatgtttctcaatcttgttaaaagctcaaaattttgggcctatttgtaatgccagtgtgacactaagcattttgttcacaccacgctttgataactaaactggaaaacaaaggtgttaagtacctctgttctggatctgggcagtcagcactctttttagatctttgtgtggctcctatttttatagaagtggagggatgcactatttcacaaggtccaagatttgttttcagatatttttgatgactgtattgtaaatactacagggatagcactatagtattgtagtcatgagacttaaagtggaaataagactatttttgacaaaagatgccattaaatttcagactgtagagccacatttacaatacctcaggctaattactgttaattttggggttgaacttttttttgacagtgagggtggattattggattgtcattagaggaaggtctagatttcctgctcttaataaaattacattgaattgatttttagaggtaatgaaaacttcctttctgagaagttagtgttaaggtcttggaatgtgaacacattgtttgtagtgctatccattcctctcctgagattttaacttactactggaaatccttaaccaattataatagctttttttctttattttcaaaatgatttcctttgctttgattagacactatgtgctttttttttttaaccatagttcatcgaaatgcagctttttctgaacttcaaagatagaatcccatttttaatgaactgaagtagcaaaatcatctttttcattctttaggaaatagctattgccaaagtgaaggtgtagataatacctagtcttgttacataaaggggatgtggtttgcagaagaattttctttataaaattgaagttttaagggacgtcagtgtttatgccatttttccagttccaaaatgattccattccattctagaaatttgaagtatgtaacctgaaatccttaataaaatttggatttaattttataaaatgtactggtgatattttgggtgtttttttttaaatgaatgtatatactttttttttgaagagtggagagtagtgatgtctagagggagctattttgtgctgaggccactatgttctgtaaatatataattttaagagcaacctcacaatccctgctaagtggagtttattatttgaagactaaaatggaattccatagttcctgataggttatattctgggttattattctgagttatctacaaacatttttgagatttgtctttacactctgattgtagtttccagcagcccatgcacactgccaagtaagtctcattttttcctgttagaaatggtgaaatatcatataatcacttataaagaaaactgatatgaaaaaattttagagttgtttgctttatggtcactcaagtagggtaagtgttccacaaattccacaagttgatagtttaacatggatgtctgaaagccacatatataatttcttaggattcttaaattagtaaatctagcttactgaagcagtattagcatcactattttagattgcaaaaataccttaattgtgtggaactggcttgtagagtggtacttaagaaaaatgggattctacctctatttctgttttagcacacttaatcaggaaaggatatattaactttcataaaaatatttttgttgtgtgaataggttaatgatatggtaaggcccctaaaataactgaattaattgtttattgtaattgtaggccattcccattattaaaaataaagacaaaacttgaagtaactgaaaatcttatcgtgctatgtagaaatattgaactaatattcaaatatttgaatgctttggtttcagggattggtttaaaattggagtccttttttatgggttagtcttacaaaaatttaagcctttatatttttgactttaaatcaaaacaaatgttattttaaatgtacagaatagattggtagtgcagaagagtgtaagttcttcataggagctttagaaaagagaaatatgtgctaattcagtttttttttaatctgcactgtacatatatacttggtaattatgagcttgattttgtttttggaaatatgtgttcataatttaggtaatttgctacttaaagcactaagtctctgatacctgaaaagtacatgtaaatggtgatggtgaaataatactgcagttaacttaatagatgtatactggtgatttttgtatgctggattaaaactccagatattaaaatataacctggataaaaagcc

SEQ ID NO: 957 - DNA, 3435 bp, Homo sapiens
  misc_feature (333)..(333): second gene starts at position 333
agatgccacgccccatagctccaccagtcaccgcggcacagtggcccttaagcgaggagcggcggcgcccgcagcaatcacagcagtgccgacgtcgtgggtgtttggtgtgaggctgcgagccgccgcgagttctcacggtcccgccggcgccaccaccgcggtcactcaccgccgccgccgccaccactgccaccacggtcgcctgccacagggtcttactctgttgcccaggctggagtgcagtggcacaatcttggctcactgcaacctctgcctcccgggttcaagcaattctcctgcctcagcctcccgagtagctgggattacaggatgatgatgctgaagctatccttgctgcagacttcgaaattggtcactttttacgtgagcgtataatcccaagatcagtgttatattttactggagaagctattgaagatgatgatgatgattatgatgaagaaggtgaagaagcggatgaggaaggggaagaagaaggagatgaggaaaatgatccagactatgacccaaagaaggatcaaaacccagcagagtgcaagcagcagtgaagcaggatgtatgtggccttgaggataacctgcactggtctaccttctgcttccctggaaaggatgaatttacatcatttgacaagcctattttcaagttatttgttgtttgtttgcttgtttttgtttttgcagctaaaataaaaatttcaaatacaattttagttcttacaagataatgtcttaattttgtaccaattcaggtagaagtagaggcctaccttgaattaagggttatactcagtttttaacacattgttgaagaaaaggtaccagctttggaacgagatgctatactaataagcaagtgtaaaaaaaaaaaaaaaagaggaagaaaatcttaagtgattgatgctgttttcttttaaaaaaaaaaaaaaaaattcattttctttgggttagagctagagagaaggccccaagcttctatggtttcttctaattcttattgcttaaagtatgagtatgtcacttacccgtgcttctgtttactgtgtaattaaaatgggtagtactgtttacctaactacctcatggatgtgttaaggcatattgagttaaatctcatataatgtttctcaatcttgttaaaagctcaaaattttgggcctatttgtaatgccagtgtgacactaagcattttgttcacaccacgctttgataactaaactggaaaacaaaggtgttaagtacctctgttctggatctgggcagtcagcactctttttagatctttgtgtggctcctatttttatagaagtggagggatgcactatttcacaaggtccaagatttgttttcagatatttttgatgactgtattgtaaatactacagggatagcactatagtattgtagtcatgagacttaaagtggaaataagactatttttgacaaaagatgccattaaatttcagactgtagagccacatttacaatacctcaggctaattactgttaattttggggttgaacttttttttgacagtgagggtggattattggattgtcattagaggaaggtctagatttcctgctcttaataaaattacattgaattgatttttagaggtaatgaaaacttcctttctgagaagttagtgttaaggtcttggaatgtgaacacattgtttgtagtgctatccattcctctcctgagattttaacttactactggaaatccttaaccaattataatagctttttttctttattttcaaaatgatttcctttgctttgattagacactatgtgctttttttttttaaccatagttcatcgaaatgcagctttttctgaacttcaaagatagaatcccatttttaatgaactgaagtagcaaaatcatctttttcattctttaggaaatagctattgccaaagtgaaggtgtagataatacctagtcttgttacataaaggggatgtggtttgcagaagaattttctttataaaattgaagttttaagggacgtcagtgtttatgccatttttccagttccaaaatgattccattccattctagaaatttgaagtatgtaacctgaaatccttaataaaatttggatttaattttataaaatgtactggtgatattttgggtgtttttttttaaatgaatgtatatactttttttttgaagagtggagagtagtgatgtctagagggagctattttgtgctgaggccactatgttctgtaaatatataattttaagagcaacctcacaatccctgctaagtggagtttattatttgaagactaaaatggaattccatagttcctgataggttatattctgggttattattctgagttatctacaaacatttttgagatttgtctttacactctgattgtagtttccagcagcccatgcacactgccaagtaagtctcattttttcctgttagaaatggtgaaatatcatataatcacttataaagaaaactgatatgaaaaaattttagagttgtttgctttatggtcactcaagtagggtaagtgttccacaaattccacaagttgatagtttaacatggatgtctgaaagccacatatataatttcttaggattcttaaattagtaaatctagcttactgaagcagtattagcatcactattttagattgcaaaaataccttaattgtgtggaactggcttgtagagtggtacttaagaaaaatgggattctacctctatttctgttttagcacacttaatcaggaaaggatatattaactttcataaaaatatttttgttgtgtgaataggttaatgatatggtaaggcccctaaaataactgaattaattgtttattgtaattgtaggccattcccattattaaaaataaagacaaaacttgaagtaactgaaaatcttatcgtgctatgtagaaatattgaactaatattcaaatatttgaatgctttggtttcagggattggtttaaaattggagtccttttttatgggttagtcttacaaaaatttaagcctttatatttttgactttaaatcaaaacaaatgttattttaaatgtacagaatagattggtagtgcagaagagtgtaagttcttcataggagctttagaaaagagaaatatgtgctaattcagtttttttttaatctgcactgtacatatatacttggtaattatgagcttgattttgtttttggaaatatgtgttcataatttaggtaatttgctacttaaagcactaagtctctgatacctgaaaagtacatgtaaatggtgatggtgaaataatactgcagttaacttaatagatgtatactggtgatttttgtatgctggattaaaactccagatattaaaatataacctggataaaaagcc

SEQ ID NO: 958 - DNA, 1328 bp, Homo sapiens
  misc_feature (958)..(958): second gene starts at position 958
atgtcccggccgcagcttcgacgctggcgcctcgtctctagcccgccgagcggcgtcccgggtctagcgctgctggcgctgctggcgctgctggcgctgcggctcgcggccgggaccgactgcccatgcccggagcctgagctctgccgcccgattcgccaccatccagatttcgaggtctttgtgtttgatgttggacagaaaacttggaaatcttatgattggtcacagattacaactgtggcaacatttggaaaatatgactcagaacttatgtgctacgctcattcaaaaggagccagagtagtacttaaaggagatgtatccttaaaggatatcattgatcctgctttcagagcatcctggatagctcaaaaacttaatttggccaaaacacaatatatggatggaattaatatagatatagagcaagaagttaattgtttatcacctgaatatgatgcattaactgctttagtcaaagaaactacagactctttccatcgtgaaattgagggatcacaggtaacctttgatgtagcttggtctccaaagaacatagacagaagatgctataattatactggaatcgcagatgcttgtgacttcctctttgtgatgtcttatgatgaacaaagtcagatctggtcagaatgtattgcagcagccaatgctccctataatcagacattaactggatataatgactacatcaagatgagcattaatcctaagaaacttgtaatgggtgttccttggtatggttatgattatacctgcctgaatctgtctgaggatcatgtttgtaccattgcaaaagtccctttccggggggctccttgtagtgacgctgcaggacgtcaggtgccctacaaaacgatcatgaagcaaataaatagttctatttctggaaacctatgggataaagatcagcgggctccttattataactataaagtttcccaggcagctgcagacttgaaacagttctgtctgcagaatgctcaacatgaccctctgctgactggagtatcttcaagtacaaatcccttcagaccccagaaagtctgttcctttttgtagtaaaatgaatctttcaaaggtttcccaaaccactccttatgatccagtgaatattcaagagagctacatttgaagcctgtacaaaagcttatccctgtaacacatgtgccataatatacaaacttctactttcgtcagtccttaacatctacctctctgaattttcatgaatttctatttcacaagggtaattgttttatatacactggcagcagcatacaataaaacttagtatgaaactttta

SEQ ID NO: 959 - DNA, 1328 bp, Homo sapiens; identical to SEQ ID NO: 958
  misc_feature (958)..(958): second gene starts at position 958

SEQ ID NO: 960 - DNA, 1328 bp, Homo sapiens; identical to SEQ ID NO: 958
  misc_feature (958)..(958): second gene starts at position 958

SEQ ID NO: 961 - DNA, 1328 bp, Homo sapiens; identical to SEQ ID NO: 958
  misc_feature (958)..(958): second gene starts at position 958

SEQ ID NO: 962 - DNA, 1328 bp, Homo sapiens; identical to SEQ ID NO: 958
  misc_feature (958)..(958): second gene starts at position 958

SEQ ID NO: 963 - DNA, 1328 bp, Homo sapiens; identical to SEQ ID NO: 958
  misc_feature (958)..(958): second gene starts at position 958

SEQ ID NO: 964 - DNA, 1328 bp, Homo sapiens; identical to SEQ ID NO: 958
  misc_feature (958)..(958): second gene starts at position 958

SEQ ID NO: 965 - DNA, 1328 bp, Homo sapiens; identical to SEQ ID NO: 958
  misc_feature (958)..(958): second gene starts at position 958

SEQ ID NO: 966 - DNA, 1328 bp, Homo sapiens; identical to SEQ ID NO: 958
  misc_feature (958)..(958): second gene starts at position 958

SEQ ID NO: 967 - DNA, 1328 bp, Homo sapiens; identical to SEQ ID NO: 958
  misc_feature (958)..(958): second gene starts at position 958

SEQ ID NO: 968 - DNA, 1328 bp, Homo sapiens; identical to SEQ ID NO: 958
  misc_feature (958)..(958): second gene starts at position 958

SEQ ID NO: 969 - DNA, 17282 bp, Homo sapiens
  misc_feature (994)..(994): second gene starts at position 994
atggcagggccacgccccagcccatgggccaggctgctcctggcagccttgatcagcgtcagcctctctgggaccttggcaaaccgctgcaagaaggccccagtgaagagctgcacggagtgtgtccgtgtggataaggactgcgcctactgcacagacgagatgttcagggaccggcgctgcaacacccaggcggagctgctggccgcgggctgccagcgggagagcatcgtggtcatggagagcagcttccaaatcacagaggagacccagattgacaccaccctgcggcgcagccagatgtccccccaaggcctgcgggtccgtctgcggcccggtgaggagcggcattttgagctggaggtgtttgagccactggagagccccgtggacctgtacatcctcatggacttctccaactccatgtccgatgatctggacaacctcaagaagatggggcagaacctggctcgggtcctgagccagctcaccagcgactacactattggatttggcaagtttgtggacaaagtcagcgtcccgcagacggacatgaggcctgagaagctgaaggagccctggcccaacagtgacccccccttctccttcaagaacgtcatcagcctgacagaagatgtggatgagttccggaataaactgcagggagagcggatctcaggcaacctggatgctcctgagggcggcttcgatgccatcctgcagacagctgtgtgcacgagggacattggctggcgcccggacagcacccacctgctggtcttctccaccgagtcagccttccactatgaggctgatggcgccaacgtgctggctggcatcatgagccgcaacgatgaacggtgccacctggacaccacgggcacctacacccagtacaggacacaggactacccgtcggtgcccaccctggtgcgcctgctcgccaagcacaacatcatccccatctttgctgtcaccaactactcctatagctactacgagaagcttcacacctatttccctgtctcctcactgggggtgctgcaggaggactcgtccaacatcgtggagctgctggaggaggccttcaatcggatccgctccaacctggacatccgggccctagacagcccccgaggccttcggacagaggtcacctccaagatgttccagaagacgaggactgggtcctttcacatccggcggggggaagtgggtatataccaggtgcagctgcgggcccttgagcacgtggatgggacgcacgtgtgccagctgccggaggaccagaagggcaacatccatctgaaaccttccttctccgacggcctcaagatggacgcgggcatcatctgtgatgtgtgcacctgcgagctgcaaaaagaggtgcggtcagctcgctgcagcttcaacggagacttcgtgtgcggacagtgtgtgtgcagcgagggctggagtggccagacctgcaactgctccaccggctctctgagtgacattcagccctgcctgcgggagggcgaggacaagccgtgctccggccgtggggagtgccagtgcgggcactgtgtgtgctacggcgaaggccgctacgagggtcagttctgcgagtatgacaacttccagtgtccccgcacttccgggttcctctgcaatgaccgaggacgctgctccatgggccagtgtgtgtgtgagcctggttggacaggcccaagctgtgactgtcccctcagcaatgccacctgcatcgacagcaatgggggcatctgtaatggacgtggccactgtgagtgtggccgctgccactgccaccagcagtcgctctacacggacaccatctgcgagatcaactactcggcgatccacccgggcctctgcgaggacctacgctcctgcgtgcagtgccaggcgtggggcaccggcgagaagaaggggcgcacgtgtgaggaatgcaacttcaaggtcaagatggtggacgagcttaagagagccgcaccaccacctcctcctccagcaggaagagctataagcactaaagtgcgtctgctagctctcggtcccacagtcctcaggcccctctctggctgcagagccctctcctcaggttgcctttcctctcctggcctccagtctcccctgctgtcccaggtagagctgggtatggatgcttagtgccctcacttcttctctctctctctataccatctgagcacccattgctcaccatcagatcaacctctgattttacatcatgatgtaatcaccactggagcttcactgttactaaattattaatttcttgcctccagtgttctatctctgaggctgagcattataagaaaatgacctctgctccttttcattgcagaaaattgccaggggcttatttcagaacaacttccacttactttccactggctctcaaactctctaacttataagtgttgtgaacccccacccaggcagtatccatgaaagcacaagtgactagtcctatgatgtacaaagcctgtatctctgtgatgatttctgtgctcttcgctgtttgcaattgctaaataaagcagatttataatacaataatatttcatacctttctagaaactgggtgtgatctcactgttggtaaagcccagcccttcccaacctgcaagctcaccttccaggactgggcccagcccatgctctccatatataagctgctgccccgagcctgattcctagtcctgcttctcttccctctctcctccagcctctcacactctcctcagctctctcatctcctggaaccatggccagcacatccaccaccatcaggagccacagcagcagccgccggggtttcagtgccaactcagccaggctccctggggtcagccgctctggcttcagcagcgtctccgtgtcccgctccaggggcagtggtggcctgggtggtgcatgtggaggagctggctttggcagccgcagtctgtatggcctggggggctccaagaggatctccattggagggggcagctgtgccatcagtggcggctatggcagcagagccggaggcagctatggctttggtggcgccgggagtggatttggtttcggtggtggagccggcattggctttggtctgggtggtggagccggccttgctggtggctttgggggccctggcttccctgtgtgcccccctggaggcatccaagaggtcaccgtcaaccagagtctcctgactcccctcaacctgcaaatcgatcccaccatccagcgggtgcgggctgaggagcgtgaacagatcaagaccctcaacaacaagtttgcctccttcatcgacaaggtgcggttcctggagcagcagaacaaggttctggaaacaaagtggaccctgctgcaggagcagggcaccaagactgtgaggcagaacctggagccgttgttcgagcagtacatcaacaacctcaggaggcagctggacagcattgtcggggaacggggccgcctggactcagagctcagaggcatgcaggacctggtggaggacttcaagaacaaatatgaggatgaaatcaacaagcgcacagcagcagagaatgaatttgtgactctgaagaaggatgtggatgctgcctacatgaacaaggttgaactgcaagccaaggcagacactctcacagacgagatcaacttcctgagagccttgtatgatgcagagctgtcccagatgcagacccacatctcagacacatctgtggtgctgtccatggacaacaaccgcaacctggacctggacagcatcatcgctgaggtcaaggcccaatatgaggagattgctcagagaagccgggctgaggctgagtcctggtaccagaccaagtacgaggagctgcaggtcacagcaggcagacatggggacgacctgcgcaacaccaagcaggagattgctgagatcaaccgcatgatccagaggctgagatctgagatcgaccacgtcaagaagcagtgcgccaacctgcaggccgccattgctgatgctgagcagcgtggggagatggccctcaaggatgccaagaacaagctggaagggctggaggatgccctgcagaaggccaagcaggacctggcccggctgctgaaggagtaccaggagctgatgaatgtcaagctggccctggacgtggagatcgccacctaccgcaagctgctggagggtgaggagtgcaggctgaatggcgaaggcgttggacaagtcaacatctctgtggtgcagtccaccgtctccagtggctatggcggtgccagtggtgtcggcagtggcttaggcctgggtggaggaagcagctactcctatggcagtggtcttggcgttggaggtggcttcagttccagcagtggcagagccattgggggtggcctcagctctgttggaggcggcagttccaccatcaagtacaccaccacctcctcctccagcaggaagagctataagcactaaagtgcgtctgctagctctcggtcccacagtcctcaggcccctctctggctgcagagccctctcctcaggttgcctttcctctcctggcctccagtctcccctgctgtcccaggtagagctgggtatggatgcttagtgccctcacttcttctctctctctctataccatctgagcacccattgctcaccatcagatcaacctctgattttacatcatgatgtaatcaccactggagcttcactgttactaaattattaatttcttgcctccagtgttctatctctgaggctgagcattataagaaaatgacctctgctccttttcattgcagaaaattgccaggggcttatttcagaacaacttccacttactttccactggctctcaaactctctaacttataagtgttgtgaacccccacccaggcagtatccatgaaagcacaagtgactagtcctatgatgtacaaagcctgtatctctgtgatgatttctgtgctcttcgctgtttgcaattgctaaataaagcagatttataatacaataatatttcatacctttctagaaactgggtgtgatctcactgttggtaaagcccagcccttcccaacctgcaagctcaccttccaggactgggcccagcccatgctctccatatataagctgctgccccgagcctgattcctagtcctgcttctcttccctctctcctccagcctctcacactctcctcagctctctcatctcctggaaccatggccagcacatccaccaccatcaggagccacagcagcagccgccggggtttcagtgccaactcagccaggctccctggggtcagccgctctggcttcagcagcgtctccgtgtcccgctccaggggcagtggtggcctgggtggtgcatgtggaggagctggctttggcagccgcagtctgtatggcctggggggctccaagaggatctccattggagggggcagctgtgccatcagtggcggctatggcagcagagccggaggcagctatggctttggtggcgccgggagtggatttggtttcggtggtggagccggcattggctttggtctgggtggtggagccggccttgctggtggctttgggggccctggcttccctgtgtgcccccctggaggcatccaagaggtcaccgtcaaccagagtctcctgactcccctcaacctgcaaatcgatcccaccatccagcgggtgcgggctgaggagcgtgaacagatcaagaccctcaacaacaagtttgcctccttcatcgacaaggtgcggttcctggagcagcagaacaaggttctggaaacaaagtggaccctgctgcaggagcagggcaccaagactgtgaggcagaacctggagccgttgttcgagcagtacatcaacaacctcaggaggcagctggacagcattgtcggggaacggggccgcctggactcagagctcagaggcatgcaggacctggtggaggacttcaagaacaaatatgaggatgaaatcaacaagcgcacagcagcagagaatgaatttgtgactctgaagaaggatgtggatgctgcctacatgaacaaggttgaactgcaagccaaggcagacactctcacagacgagatcaacttcctgagagccttgtatgatgcagagctgtcccagatgcagacccacatctcagacacatctgtggtgctgtccatggacaacaaccgcaacctggacctggacagcatcatcgctgaggtcaaggcccaatatgaggagattgctcagagaagccgggctgaggctgagtcctggtaccagaccaagtacgaggagctgcaggtcacagcaggcagacatggggacgacctgcgcaacaccaagcaggagattgctgagatcaaccgcatgatccagaggctgagatctgagatcgaccacgtcaagaagcagtgcgccaacctgcaggccgccattgctgatgctgagcagcgtggggagatggccctcaaggatgccaagaacaagctggaagggctggaggatgccctgcagaaggccaagcaggacctggcccggctgctgaaggagtaccaggagctgatgaatgtcaagctggccctggacgtggagatcgccacctaccgcaagctgctggagggtgaggagtgcaggctgaatggcgaaggcgttggacaagtcaacatctctgtggtgcagtccaccgtctccagtggctatggcggtgccagtggtgtcggcagtggcttaggcctgggtggaggaagcagctactcctatggcagtggtcttggcgttggaggtggcttcagttccagcagtggcagagccattgggggtggcctcagctctgttggaggcggcagttccaccatcaagtacaccaccacctcctcctccagcaggaagagctataagcactaaagtgcgtctgctagctctcggtcccacagtcctcaggcccctctctggctgcagagccctctcctcaggttgcctttcctctcctggcctccagtctcccctgctgtcccaggtagagctgggtatggatgcttagtgccctcacttcttctctctctctctataccatctgagcacccattgctcaccatcagatcaacctctgattttacatcatgatgtaatcaccactggagcttcactgttactaaattattaatttcttgcctccagtgttctatctctgaggctgagcattataagaaaatgacctctgctccttttcattgcagaaaattgccaggggcttatttcagaacaacttccacttactttccactggctctcaaactctctaacttataagtgttgtgaacccccacccaggcagtatccatgaaagcacaagtgactagtcctatgatgtacaaagcctgtatctctgtgatgatttctgtgctcttcgctgtttgcaattgctaaataaagcagatttataatacaataatatttcatacctttctagaaactgggtgtgatctcactgttggtaaagcccagcccttcccaacctgcaagctcaccttccaggactgggcccagcccatgctctccatatataagctgctgccccgagcctgattcctagtcctgcttctcttccctctctcctccagcctctcacactctcctcagctctctcatctcctggaaccatggccagcacatccaccaccatcaggagccacagcagcagccgccggggtttcagtgccaactcagccaggctccctggggtcagccgctctggcttcagcagcgtctccgtgtcccgctccaggggcagtggtggcctgggtggtgcatgtggaggagctggctttggcagccgcagtctgtatggcctggggggctccaagaggatctccattggagggggcagctgtgccatcagtggcggctatggcagcagagccggaggcagctatggctttggtggcgccgggagtggatttggtttcggtggtggagccggcattggctttggtctgggtggtggagccggccttgctggtggctttgggggccctggcttccctgtgtgcccccctggaggcatccaagaggtcaccgtcaaccagagtctcctgactcccctcaacctgcaaatcgatcccaccatccagcgggtgcgggctgaggagcgtgaacagatcaagaccctcaacaacaagtttgcctccttcatcgacaaggtgcggttcctggagcagcagaacaaggttctggaaacaaagtggaccctgctgcaggagcagggcaccaagactgtgaggcagaacctggagccgttgttcgagcagtacatcaacaacctcaggaggcagctggacagcattgtcggggaacggggccgcctggactcagagctcagaggcatgcaggacctggtggaggacttcaagaacaaatatgaggatgaaatcaacaagcgcacagcagcagagaatgaatttgtgactctgaagaaggatgtggatgctgcctacatgaacaaggttgaactgcaagccaaggcagacactctcacagacgagatcaacttcctgagagccttgtatgatgcagagctgtcccagatgcagacccacatctcagacacatctgtggtgctgtccatggacaacaaccgcaacctggacctggacagcatcatcgctgaggtcaaggcccaatatgaggagattgctcagagaagccgggctgaggctgagtcctggtaccagaccaagtacgaggagctgcaggtcacagcaggcagacatggggacgacctgcgcaacaccaagcaggagattgctgagatcaaccgcatgatccagaggctgagatctgagatcgaccacgtcaagaagcagtgcgccaacctgcaggccgccattgctgatgctgagcagcgtggggagatggccctcaaggatgccaagaacaagctggaagggctggaggatgccctgcagaaggccaagcaggacctggcccggctgctgaaggagtaccaggagctgatgaatgtcaagctggccctggacgtggagatcgccacctaccgcaagctgctggagggtgaggagtgcaggctgaatggcgaaggcgttggacaagtcaacatctctgtggtgcagtccaccgtctccagtggctatggcggtgccagtggtgtcggcagtggcttaggcctgggtggaggaagcagctactcctatggcagtggtcttggcgttggaggtggcttcagttccagcagtggcagagccattgggggtggcctcagctctgttggaggcggcagttccaccatcaagtacaccaccacctcctcctccagcaggaagagctataagcactaaagtgcgtctgctagctctcggtcccacagtcctcaggcccctctctggctgcagagccctctcctcaggttgcctttcctctcctggcctccagtctcccctgctgtcccaggtagagctgggtatggatgcttagtgccctcacttcttctctctctctctataccatctgagcacccattgctcaccatcagatcaacctctgattttacatcatgatgtaatcaccactggagcttcactgttactaaattattaatttcttgcctccagtgttctatctctgaggctgagcattataagaaaatgacctctgctccttttcattgcagaaaattgccaggggcttatttcagaacaacttccacttactttccactggctctcaaactctctaacttataagtgttgtgaacccccacccaggcagtatccatgaaagcacaagtgactagtcctatgatgtacaaagcctgtatctctgtgatgatttctgtgctcttcgctgtttgcaattgctaaataaagcagatttataatacaataatatttcatacctttctagaaactgggtgtgatctcactgttggtaaagcccagcccttcccaacctgcaagctcaccttccaggactgggcccagcccatgctctccatatataagctgctgccccgagcctgattcctagtcctgcttctcttccctctctcctccagcctctcacactctcctcagctctctcatctcctggaaccatggccagcacatccaccaccatcaggagccacagcagcagccgccggggtttcagtgccaactcagccaggctccctggggtcagccgctctggcttcagcagcgtctccgtgtcccgctccaggggcagtggtggcctgggtggtgcatgtggaggagctggctttggcagccgcagtctgtatggcctggggggctccaagaggatctccattggagggggcagctgtgccatcagtggcggctatggcagcagagccggaggcagctatggctttggtggcgccgggagtggatttggtttcggtggtggagccggcattggctttggtctgggtggtggagccggccttgctggtggctttgggggccctggcttccctgtgtgcccccctggaggcatccaagaggtcaccgtcaaccagagtctcctgactcccctcaacctgcaaatcgatcccaccatccagcgggtgcgggctgaggagcgtgaacagatcaagaccctcaacaacaagtttgcctccttcatcgacaaggtgcggttcctggagcagcagaacaaggttctggaaacaaagtggaccctgctgcaggagcagggcaccaagactgtgaggcagaacctggagccgttgttcgagcagtacatcaacaacctcaggaggcagctggacagcattgtcggggaacggggccgcctggactcagagctcagaggcatgcaggacctggtggaggacttcaagaacaaatatgaggatgaaatcaacaagcgcacagcagcagagaatgaatttgtgactctgaagaaggatgtggatgctgcctacatgaacaaggttgaactgcaagccaaggcagacactctcacagacgagatcaacttcctgagagccttgtatgatgcagagctgtcccagatgcagacccacatctcagacacatctgtggtgctgtccatggacaacaaccgcaacctggacctggacagcatcatcgctgaggtcaaggcccaatatgaggagattgctcagagaagccgggctgaggctgagtcctggtaccagaccaagtacgaggagctgcaggtcacagcaggcagacatggggacgacctgcgcaacaccaagcaggagattgctgagatcaaccgcatgatccagaggctgagatctgagatcgaccacgtcaagaagcagtgcgccaacctgcaggccgccattgctgatgctgagcagcgtggggagatggccctcaaggatgccaagaacaagctggaagggctggaggatgccctgcagaaggccaagcaggacctggcccggctgctgaaggagtaccaggagctgatgaatgtcaagctggccctggacgtggagatcgccacctaccgcaagctgctggagggtgaggagtgcaggctgaatggcgaaggcgttggacaagtcaacatctctgtggtgcagtccaccgtctccagtggctatggcggtgccagtggtgtcggcagtggcttaggcctgggtggaggaagcagctactcctatggcagtggtcttggcgttggaggtggcttcagttccagcagtggcagagccattgggggtggcctcagctctgttggaggcggcagttccaccatcaagtacaccaccacctcctcctccagcaggaagagctataagcactaaagtgcgtctgctagctctcggtcccacagtcctcaggcccctctctggctgcagagccctctcctcaggttgcctttcctctcctggcctccagtctcccctgctgtcccaggtagagctgggtatggatgcttagtgccctcacttcttctctctctctctataccatctgagcacccattgctcaccatcagatcaacctctgattttacatcatgatgtaatcaccactggagcttcactgttactaaattattaatttcttgcctccagtgttctatctctgaggctgagcattataagaaaatgacctctgctccttttcattgcagaaaattgccaggggcttatttcagaacaacttccacttactttccactggctctcaaactctctaacttataagtgttgtgaacccccacccaggcagtatccatgaaagcacaagtgactagtcctatgatgtacaaagcctgtatctctgtgatgatttctgtgctcttcgctgtttgcaattgctaaataaagcagatttataatacaataatatttcatacctttctagaaactgggtgtgatctcactgttggtaaagcccagcccttcccaacctgcaagctcaccttccaggactgggcccagcccatgctctccatatataagctgctgccccgagcctgattcctagtcctgcttctcttccctctctcctccagcctctcacactctcctcagctctctcatctcctggaaccatggccagcacatccaccaccatcaggagccacagcagcagccgccggggtttcagtgccaactcagccaggctccctggggtcagccgctctggcttcagcagcgtctccgtgtcccgctccaggggcagtggtggcctgggtggtgcatgtggaggagctggctttggcagccgcagtctgtatggcctggggggctccaagaggatctccattggagggggcagctgtgccatcagtggcggctatggcagcagagccggaggcagctatggctttggtggcgccgggagtggatttggtttcggtggtggagccggcattggctttggtctgggtggtggagccggccttgctggtggctttgggggccctggcttccctgtgtgcccccctggaggcatccaagaggtcaccgtcaaccagagtctcctgactcccctcaacctgcaaatcgatcccaccatccagcgggtgcgggctgaggagcgtgaacagatcaagaccctcaacaacaagtttgcctccttcatcgacaaggtgcggttcctggagcagcagaacaaggttctggaaacaaagtggaccctgctgcaggagcagggcaccaagactgtgaggcagaacctggagccgttgttcgagcagtacatcaacaacctcaggaggcagctggacagcattgtcggggaacggggccgcctggactcagagctcagaggcatgcaggacctggtggaggacttcaagaacaaatatgaggatgaaatcaacaagcgcacagcagcagagaatgaatttgtgactctgaagaaggatgtggatgctgcctacatgaacaaggttgaactgcaagccaaggcagacactctcacagacgagatcaacttcctgagagccttgtatgatgcagagctgtcccagatgcagacccacatctcagacacatctgtggtgctgtccatggacaacaaccgcaacctggacctggacagcatcatcgctgaggtcaaggcccaatatgaggagattgctcagagaagccgggctgaggctgagtcctggtaccagaccaagtacgaggagctgcaggtcacagcaggcagacatggggacgacctgcgcaacaccaagcaggagattgctgagatcaaccgcatgatccagaggctgagatctgagatcgaccacgtcaagaagcagtgcgccaacctgcaggccgccattgctgatgctgagcagcgtggggagatggccctcaaggatgccaagaacaagctggaagggctggaggatgccctgcagaaggccaagcaggacctggcccggctgctgaaggagtaccaggagctgatgaatgtcaagctggccctggacgtggagatcgccacctaccgcaagctgctggagggtgaggagtgcaggctgaatggcgaaggcgttggacaagtcaacatctctgtggtgcagtccaccgtctccagtggctatggcggtgccagtggtgtcggcagtggcttaggcctgggtggaggaagcagctactcctatggcagtggtcttggcgttggaggtggcttcagttccagcagtggcagagccattgggggtggcctcagctctgttggaggcggcagttccaccatcaagtacaccaccacctcctcctccagcaggaagagctataagcactaaagtgcgtctgctagctctcggtcccacagtcctcaggcccctctctggctgcagagccctctcctcaggttgcctttcctctcctggcctccagtctcccctgctgtcccaggtagagctgggtatggatgcttagtgccctcacttcttctctctctctctataccatctgagcacccattgctcaccatcagatcaacctctgattttacatcatgatgtaatcaccactggagcttcactgttactaaattattaatttcttgcctccagtgttctatctctgaggctgagcattataagaaaatgacctctgctccttttcattgcagaaaattgccaggggcttatttcagaacaacttccacttactttccactggctctcaaactctctaacttataagtgttgtgaacccccacccaggcagtatccatgaaagcacaagtgactagtcctatgatgtacaaagcctgtatctctgtgatgatttctgtgctcttcgctgtttgcaattgctaaataaagcagatttataatacaataatatttcatacctttctagaaactgggtgtgatctcactgttggtaaagcccagcccttcccaacctgcaagctcaccttccaggactgggcccagcccatgctctccatatataagctgctgccccgagcctgattcctagtcctgcttctcttccctctctcctccagcctctcacactctcctcagctctctcatctcctggaaccatggccagcacatccaccaccatcaggagccacagcagcagccgccggggtttcagtgccaactcagccaggctccctggggtcagccgctctggcttcagcagcgtctccgtgtcccgctccaggggcagtggtggcctgggtggtgcatgtggaggagctggctttggcagccgcagtctgtatggcctggggggctccaagaggatctccattggagggggcagctgtgccatcagtggcggctatggcagcagagccggaggcagctatggctttggtggcgccgggagtggatttggtttcggtggtggagccggcattggctttggtctgggtggtggagccggccttgctggtggctttgggggccctggcttccctgtgtgcccccctggaggcatccaagaggtcaccgtcaaccagagtctcctgactcccctcaacctgcaaatcgatcccaccatccagcgggtgcgggctgaggagcgtgaacagatcaagaccctcaacaacaagtttgcctccttcatcgacaaggtgcggttcctggagcagcagaacaaggttctggaaacaaagtggaccctgctgcaggagcagggcaccaagactgtgaggcagaacctggagccgttgttcgagcagtacatcaacaacctcaggaggcagctggacagcattgtcggggaacggggccgcctggactcagagctcagaggcatgcaggacctggtggaggacttcaagaacaaatatgaggatgaaatcaacaagcgcacagcagcagagaatgaatttgtgactctgaagaaggatgtggatgctgcctacatgaacaaggttgaactgcaagccaaggcagacactctcacagacgagatcaacttcctgagagccttgtatgatgcagagctgtcccagatgcagacccacatctcagacacatctgtggtgctgtccatggacaacaaccgcaacctggacctggacagcatcatcgctgaggtcaaggcccaatatgaggagattgctcagagaagccgggctgaggctgagtcctggtaccagaccaagtacgaggagctgcaggtcacagcaggcagacatggggacgacctgcgcaacaccaagcaggagattgctgagatcaaccgcatgatccagaggctgagatctgagatcgaccacgtcaagaagcagtgcgccaacctgcaggccgccattgctgatgctgagcagcgtggggagatggccctcaaggatgccaagaacaagctggaagggctggaggatgccctgcagaaggccaagcaggacctggcccggctgctgaaggagtaccaggagctgatgaatgtcaagctggccctggacgtggagatcgccacctaccgcaagctgctggagggtgaggagtgcaggctgaatggcgaaggcgttggacaagtcaacatctctgtggtgcagtccaccgtctccagtggctatggcggtgccagtggtgtcggcagtggcttaggcctgggtggaggaagcagctactcctatggcagtggtcttggcgttggaggtggcttcagttccagcagtggcagagccattgggggtggcctcagctctgttggaggcggcagttccaccatcaagtacaccaccacctcctcctccagcaggaagagctataagcactaaagtgcgtctgctagctctcggtcccacagtcctcaggcccctctctggctgcagagccctctcctcaggttgcctttcctctcctggcctccagtctcccctgctgtcccaggtagagctgggtatggatgcttagtgccctcacttcttctctctctctctataccatctgagcacccattgctcaccatcagatcaacctctgattttacatcatgatgtaatcaccactggagcttcactgttactaaattattaatttcttgcctccagtgttctatctctgaggctgagcattataagaaaatgacctctgctccttttcattgcagaaaattgccaggggcttatttcagaacaacttccacttactttccactggctctcaaactctctaacttataagtgttgtgaacccccacccaggcagtatccatgaaagcacaagtgactagtcctatgatgtacaaagcctgtatctctgtgatgatttctgtgctcttcgctgtttgcaattgctaaataaagcagatttataatacaata

SEQ ID NO: 970 - DNA, 17282 bp, Homo sapiens; identical to SEQ ID NO: 969
  misc_feature (994)..(994): second gene starts at position 994

SEQ ID NO: 971 - DNA, 17282 bp, Homo sapiens; identical to SEQ ID NO: 969
  misc_feature (994)..(994): second gene starts at position 994

SEQ ID NO: 972 - DNA, 9781 bp, Homo sapiens
  misc_feature (599)..(599): second gene starts at position 599
atgtccatccacttcagctccccggtattcacctcgcgctcagccgccttctcgggccgcggcgcccaggtgcgcctgagctccgctcgccccggcggccttggcagcagcagcctctacggcctcggcgcctcacggccgcgcgtggccgtgcgctctgcctatgggggcccggtgggcgccggcatccgcgaggtcaccattaaccagagcctgctggccccgctgcggctggacgccgacccctccctccagcgggtgcgccaggaggagagcgagcagatcaagaccctcaacaacaagtttgcctccttcatcgacaaggtgcggtttctggagcagcagaacaagctgctggagaccaagtggacgctgctgcaggagcagaagtcggccaagagcagccgcctcccagacatctttgaggcccagattgctggccttcggggtcagcttgaggcactgcaggtggatgggggccgcctggaggcggagctgcggagcatgcaggatgtggtggaggacttcaagaataagtacgaagatgaaattaaccaccgcacagctgctgagaatgagtttgtggtgctgaagaaggggagccactctcaaaatcacgctggataacgcctacatggaaaagtgtgacgagaacatcctgtggctggactacaagaacatctgcaaggtggtggaagtgggcagcaagatctacgtggatgatgggcttatttctctccaggtgaagcagaaaggtgccgacttcctggtgacggaggtggaaaatggtggctccttgggcagcaagaagggtgtgaaccttcctggggctgctgtggacttgcctgctgtgtcggagaaggacatccaggatctgaagtttggggtcgagcaggatgttgatatggtgtttgcgtcattcatccgcaaggcatctgatgtccatgaagttaggaaggtcctgggagagaagggaaagaacatcaagattatcagcaaaatcgagaatcatgagggggttcggaggtttgatgaaatcctggaggccagtgatgggatcatggtggctcgtggtgatctaggcattgagattcctgcagagaaggtcttccttgctcagaagatgatgattggacggtgcaaccgagctgggaagcctgtcatctgtgctactcagatgctggagagcatgatcaagaagccccgccccactcgggctgaaggcagtgatgtggccaatgcagtcctggatggagccgactgcatcatgctgtctggagaaacagccaaaggggactatcctctggaggctgtgcgcatgcagcacctgattgcccgtgaggcagaggctgccatctaccacttgcaattatttgaggaactccgccgcctggcgcccattaccagcgaccccacagaagccaccgccgtgggtgccgtggaggcctccttcaagtgctgcagtggggccataatcgtcctcaccaagtctggcaggtctgctcaccaggtggccagataccgcccacgtgcccccatcattgctgtgacccggaatccccagacagctcgtcaggcccacctgtaccgtggcatcttccctgtgctgtgcaaggacccagtccaggaggcctgggctgaggacgtggacctccgggtgaactttgccatgaatgttggcaaggcccgaggcttcttcaagaagggagatgtggtcattgtgctgaccggatggcgccctggctccggcttcaccaacaccatgcgtgttgttcctgtgccgtgatggaccccagagcccctcctccagcccctgtcccacccccttcccccagcccatccattaggccagcaacgcttgtagaactcactctgggctgtaacgtggcactggtaggttgggacaccagggaagaagatcaacgcctcactgaaacatggctgtgtttgcagcctgctctagtgggacagcccagagcctggctgcccatcatgtggccccacccaatcaagggaagaaggaggaatgctggactggaggcccctggagccagatggcaagagggtgacagcttcctttcctgtgtgtactctgtccagttcctttagaaaaaatggatgcccagaggactcccaaccctggcttggggtcaagaaacagccagcaagagttaggggccttagggcactgggctgttgttccattgaagccgactctggccctggcccttacttgcttctctagctctctaggcctctccagtttgcacctgtccccaccctccactcagctgtcctgcagcaaacactccaccctccaccttccattttcccccactactgcagcacctccaggcctgttgctatagagcctacctgtatgtcaataaacaacagctgaagcacccgccgcgcttcctcctgaaggtgactgcgcccgcggggacgcagggggcggggcccgggtcgcccggagccgggattgggcagagggcggggcggcggagggattgcggcggcccgcagcgggataaccttgaggctgaggcagtggctccttgcacagcagctgcacgcgccgtggctccggatctcttcgtctttgcagcgtagcccgagtcggtcagcgccggaggacctcagcagccatgtcgaagccccatagtgaagccgggactgccttcattcagacccagcagctgcacgcagccatggctgacacattcctggagcacatgtgccgcctggacattgattcaccacccatcacagcccggaacactggcatcatctgtaccattggcccagcttcccgatcagtggagacgttgaaggagatgattaagtctggaatgaatgtggctcgtctgaacttctctcatggaactcatgagtaccatgcggagaccatcaagaatgtgcgcacagccacggaaagctttgcttctgaccccatcctctaccggcccgttgctgtggctctagacactaaaggacctgagatccgaactgggctcatcaagggcagcggcactgcagaggtggagctgaagaagggagccactctcaaaatcacgctggataacgcctacatggaaaagtgtgacgagaacatcctgtggctggactacaagaacatctgcaaggtggtggaagtgggcagcaagatctacgtggatgatgggcttatttctctccaggtgaagcagaaaggtgccgacttcctggtgacggaggtggaaaatggtggctccttgggcagcaagaagggtgtgaaccttcctggggctgctgtggacttgcctgctgtgtcggagaaggacatccaggatctgaagtttggggtcgagcaggatgttgatatggtgtttgcgtcattcatccgcaaggcatctgatgtccatgaagttaggaaggtcctgggagagaagggaaagaacatcaagattatcagcaaaatcgagaatcatgagggggttcggaggtttgatgaaatcctggaggccagtgatgggatcatggtggctcgtggtgatctaggcattgagattcctgcagagaaggtcttccttgctcagaagatgatgattggacggtgcaaccgagctgggaagcctgtcatctgtgctactcagatgctggagagcatgatcaagaagccccgccccactcgggctgaaggcagtgatgtggccaatgcagtcctggatggagccgactgcatcatgctgtctggagaaacagccaaaggggactatcctctggaggctgtgcgcatgcagcacctgattgcccgtgaggcagaggctgccatctaccacttgcaattatttgaggaactccgccgcctggcgcccattaccagcgaccccacagaagccaccgccgtgggtgccgtggaggcctccttcaagtgctgcagtggggccataatcgtcctcaccaagtctggcaggtctgctcaccaggtggccagataccgcccacgtgcccccatcattgctgtgacccggaatccccagacagctcgtcaggcccacctgtaccgtggcatcttccctgtgctgtgcaaggacccagtccaggaggcctgggctgaggacgtggacctccgggtgaactttgccatgaatgttggcaaggcccgaggcttcttcaagaagggagatgtggtcattgtgctgaccggatggcgccctggctccggcttcaccaacaccatgcgtgttgttcctgtgccgtgatggaccccagagcccctcctccagcccctgtcccacccccttcccccagcccatccattaggccagcaacgcttgtagaactcactctgggctgtaacgtggcactggtaggttgggacaccagggaagaagatcaacgcctcactgaaacatggctgtgtttgcagcctgctctagtgggacagcccagagcctggctgcccatcatgtggccccacccaatcaagggaagaaggaggaatgctggactggaggcccctggagccagatggcaagagggtgacagcttcctttcctgtgtgtactctgtccagttcctttagaaaaaatggatgcccagaggactcccaaccctggcttggggtcaagaaacagccagcaagagttaggggccttagggcactgggctgttgttccattgaagccgactctggccctggcccttacttgcttctctagctctctaggcctctccagtttgcacctgtccccaccctccactcagctgtcctgcagcaaacactccaccctccaccttccattttcccccactactgcagcacctccaggcctgttgctatagagcctacctgtatgtcaataaacaacagctgaagcacccgccgcgcttcctcctgaaggtgactgcgcccgcggggacgcagggggcggggcccgggtcgcccggagccgggattgggcagagggcggggcggcggagggattgcggcggcccgcagcgggataaccttgaggctgaggcagtggctccttgcacagcagctgcacgcgccgtggctccggatctcttcgtctttgcagcgtagcccgagtcggtcagcgccggaggacctcagcagccatgtcgaagccccatagtgaagccgggactgccttcattcagacccagcagctgcacgcagccatggctgacacattcctggagcacatgtgccgcctggacattgattcaccacccatcacagcccggaacactggcatcatctgtaccattggcccagcttcccgatcagtggagacgttgaaggagatgattaagtctggaatgaatgtggctcgtctgaacttctctcatggaactcatgagtaccatgcggagaccatcaagaatgtgcgcacagccacggaaagctttgcttctgaccccatcctctaccggcccgttgctgtggctctagacactaaaggacctgagatccgaactgggctcatcaagggcagcggcactgcagaggtggagctgaagaagggagccactctcaaaatcacgctggataacgcctacatggaaaagtgtgacgagaacatcctgtggctggactacaagaacatctgcaaggtggtggaagtgggcagcaagatctacgtggatgatgggcttatttctctccaggtgaagcagaaaggtgccgacttcctggtgacggaggtggaaaatggtggctccttgggcagcaagaagggtgtgaaccttcctggggctgctgtggacttgcctgctgtgtcggagaaggacatccaggatctgaagtttggggtcgagcaggatgttgatatggtgtttgcgtcattcatccgcaaggcatctgatgtccatgaagttaggaaggtcctgggagagaagggaaagaacatcaagattatcagcaaaatcgagaatcatgagggggttcggaggtttgatgaaatcctggaggccagtgatgggatcatggtggctcgtggtgatctaggcattgagattcctgcagagaaggtcttccttgctcagaagatgatgattggacggtgcaaccgagctgggaagcctgtcatctgtgctactcagatgctggagagcatgatcaagaagccccgccccactcgggctgaaggcagtgatgtggccaatgcagtcctggatggagccgactgcatcatgctgtctggagaaacagccaaaggggactatcctctggaggctgtgcgcatgcagcacctgattgcccgtgaggcagaggctgccatctaccacttgcaattatttgaggaactccgccgcctggcgcccattaccagcgaccccacagaagccaccgccgtgggtgccgtggaggcctccttcaagtgctgcagtggggccataatcgtcctcaccaagtctggcaggtctgctcaccaggtggccagataccgcccacgtgcccccatcattgctgtgacccggaatccccagacagctcgtcaggcccacctgtaccgtggcatcttccctgtgctgtgcaaggacccagtccaggaggcctgggctgaggacgtggacctccgggtgaactttgccatgaatgttggcaaggcccgaggcttcttcaagaagggagatgtggtcattgtgctgaccggatggcgccctggctccggcttcaccaacaccatgcgtgttgttcctgtgccgtgatggaccccagagcccctcctccagcccctgtcccacccccttcccccagcccatccattaggccagcaacgcttgtagaactcactctgggctgtaacgtggcactggtaggttgggacaccagggaagaagatcaacgcctcactgaaacatggctgtgtttgcagcctgctctagtgggacagcccagagcctggctgcccatcatgtggccccacccaatcaagggaagaaggaggaatgctggactggaggcccctggagccagatggcaagagggtgacagcttcctttcctgtgtgtactctgtccagttcctttagaaaaaatggatgcccagaggactcccaaccctggcttggggtcaagaaacagccagcaagagttaggggccttagggcactgggctgttgttccattgaagccgactctggccctggcccttacttgcttctctagctctctaggcctctccagtttgcacctgtccccaccctccactcagctgtcctgcagcaaacactccaccctccaccttccattttcccccactactgcagcacctccaggcctgttgctatagagcctacctgtatgtcaataaacaacagctgaagcacccgccgcgcttcctcctgaaggtgactgcgcccgcggggacgcagggggcggggcccgggtcgcccggagccgggattgggcagagggcggggcggcggagggattgcggcggcccgcagcgggataaccttgaggctgaggcagtggctccttgcacagcagctgcacgcgccgtggctccggatctcttcgtctttgcagcgtagcccgagtcggtcagcgccggaggacctcagcagccatgtcgaagccccatagtgaagccgggactgccttcattcagacccagcagctgcacgcagccatggctgacacattcctggagcacatgtgccgcctggacattgattcaccacccatcacagcccggaacactggcatcatctgtaccattggcccagcttcccgatcagtggagacgttgaaggagatgattaagtctggaatgaatgtggctcgtctgaacttctctcatggaactcatgagtaccatgcggagaccatcaagaatgtgcgcacagccacggaaagctttgcttctgaccccatcctctaccggcccgttgctgtggctctagacactaaaggacctgagatccgaactgggctcatcaagggcagcggcactgcagaggtggagctgaagaagggagccactctcaaaatcacgctggataacgcctacatggaaaagtgtgacgagaacatcctgtggctggactacaagaacatctgcaaggtggtggaagtgggcagcaagatctacgtggatgatgggcttatttctctccaggtgaagcagaaaggtgccgacttcctggtgacggaggtggaaaatggtggctccttgggcagcaagaagggtgtgaaccttcctggggctgctgtggacttgcctgctgtgtcggagaaggacatccaggatctgaagtttggggtcgagcaggatgttgatatggtgtttgcgtcattcatccgcaaggcatctgatgtccatgaagttaggaaggtcctgggagagaagggaaagaacatcaagattatcagcaaaatcgagaatcatgagggggttcggaggtttgatgaaatcctggaggccagtgatgggatcatggtggctcgtggtgatctaggcattgagattcctgcagagaaggtcttccttgctcagaagatgatgattggacggtgcaaccgagctgggaagcctgtcatctgtgctactcagatgctggagagcatgatcaagaagccccgccccactcgggctgaaggcagtgatgtggccaatgcagtcctggatggagccgactgcatcatgctgtctggagaaacagccaaaggggactatcctctggaggctgtgcgcatgcagcacctgattgcccgtgaggcagaggctgccatctaccacttgcaattatttgaggaactccgccgcctggcgcccattaccagcgaccccacagaagccaccgccgtgggtgccgtggaggcctccttcaagtgctgcagtggggccataatcgtcctcaccaagtctggcaggtctgctcaccaggtggccagataccgcccacgtgcccccatcattgctgtgacccggaatccccagacagctcgtcaggcccacctgtaccgtggcatcttccctgtgctgtgcaaggacccagtccaggaggcctgggctgaggacgtggacctccgggtgaactttgccatgaatgttggcaaggcccgaggcttcttcaagaagggagatgtggtcattgtgctgaccggatggcgccctggctccggcttcaccaacaccatgcgtgttgttcctgtgccgtgatggaccccagagcccctcctccagcccctgtcccacccccttcccccagcccatccattaggccagcaacgcttgtagaactcactctgggctgtaacgtggcactggtaggttgggacaccagggaagaagatcaacgcctcactgaaacatggctgtgtttgcagcctgctctagtgggacagcccagagcctggctgcccatcatgtggccccacccaatcaagggaagaaggaggaatgctggactggaggcccctggagccagatggcaagagggtgacagcttcctttcctgtgtgtactctgtccagttcctttagaaaaaatggatgcccagaggactcccaaccctggcttggggtcaagaaacagccagcaagagttaggggccttagggcactgggctgttgttccattgaagccgactctggccctggcccttacttgcttctctagctctctaggcctctccagtttgcacctgtccccaccctccactcagctgtcctgcagcaaacactccaccctccaccttccattttcccccactactgcagcacctccaggcctgttgctatagagcctacctgtatgtcaataaacaacagctgaagcacc

SEQ ID NO: 973 - DNA, 9781 bp, Homo sapiens
  misc_feature (599)..(599): second gene starts at position 599
atgtccatccacttcagctccccggtattcacctcgcgctcagccgccttctcgggccgcggcgcccaggtgcgcctgagctccgctcgccccggcggccttggcagcagcagcctctacggcctcggcgcctcacggccgcgcgtggccgtgcgctctgcctatgggggcccggtgggcgccggcatccgcgaggtcaccattaaccagagcctgctggccccgctgcggctggacgccgacccctccctccagcgggtgcgccaggaggagagcgagcagatcaagaccctcaacaacaagtttgcctccttcatcgacaaggtgcggtttctggagcagcagaacaagctgctggagaccaagtggacgctgctgcaggagcagaagtcggccaagagcagccgcctcccagacatctttgaggcccagattgctggccttcggggtcagcttgaggcactgcaggtggatgggggccgcctggaggcggagctgcggagcatgcaggatgtggtggaggacttcaagaataagtacgaagatgaaattaaccaccgcacagctgctgagaatgagtttgtggtgctgaagaaggggagccactctcaaaatcacgctggataacgcctacatggaaaagtgtgacgagaacatcctgtggctggactacaagaacatctgcaaggtggtggaagtgggcagcaagatctacgtggatgatgggcttatttctctccaggtgaagcagaaaggtgccgacttcctggtgacggaggtggaaaatggtggctccttgggcagcaagaagggtgtgaaccttcctggggctgctgtggacttgcctgctgtgtcggagaaggacatccaggatctgaagtttggggtcgagcaggatgttgatatggtgtttgcgtcattcatccgcaaggcatctgatgtccatgaagttaggaaggtcctgggagagaagggaaagaacatcaagattatcagcaaaatcgagaatcatgagggggttcggaggtttgatgaaatcctggaggccagtgatgggatcatggtggctcgtggtgatctaggcattgagattcctgcagagaaggtcttccttgctcagaagatgatgattggacggtgcaaccgagctgggaagcctgtcatctgtgctactcagatgctggagagcatgatcaagaagccccgccccactcgggctgaaggcagtgatgtggccaatgcagtcctggatggagccgactgcatcatgctgtctggagaaacagccaaaggggactatcctctggaggctgtgcgcatgcagcacctgatagctcgtgaggctgaggcagccatgttccaccgcaagctgtttgaagaacttgtgcgagcctcaagtcactccacagacctcatggaagccatggccatgggcagcgtggaggcttcttataagtgtttagcagcagctttgatagttctgacggagtctggcaggtctgctcaccaggtggccagataccgcccacgtgcccccatcattgctgtgacccggaatccccagacagctcgtcaggcccacctgtaccgtggcatcttccctgtgctgtgcaaggacccagtccaggaggcctgggctgaggacgtggacctccgggtgaactttgccatgaatgttggcaaggcccgaggcttcttcaagaagggagatgtggtcattgtgctgaccggatggcgccctggctccggcttcaccaacaccatgcgtgttgttcctgtgccgtgatggaccccagagcccctcctccagcccctgtcccacccccttcccccagcccatccattaggccagcaacgcttgtagaactcactctgggctgtaacgtggcactggtaggttgggacaccagggaagaagatcaacgcctcactgaaacatggctgtgtttgcagcctgctctagtgggacagcccagagcctggctgcccatcatgtggccccacccaatcaagggaagaaggaggaatgctggactggaggcccctggagccagatggcaagagggtgacagcttcctttcctgtgtgtactctgtccagttcctttagaaaaaatggatgcccagaggactcccaaccctggcttggggtcaagaaacagccagcaagagttaggggccttagggcactgggctgttgttccattgaagccgactctggccctggcccttacttgcttctctagctctctaggcctctccagtttgcacctgtccccaccctccactcagctgtcctgcagcaaacactccaccctccaccttccattttcccccactactgcagcacctccaggcctgttgctatagagcctacctgtatgtcaataaacaacagctgaagcacccgccgcgcttcctcctgaaggtgactgcgcccgcggggacgcagggggcggggcccgggtcgcccggagccgggattgggcagagggcggggcggcggagggattgcggcggcccgcagcgggataaccttgaggctgaggcagtggctccttgcacagcagctgcacgcgccgtggctccggatctcttcgtctttgcagcgtagcccgagtcggtcagcgccggaggacctcagcagccatgtcgaagccccatagtgaagccgggactgccttcattcagacccagcagctgcacgcagccatggctgacacattcctggagcacatgtgccgcctggacattgattcaccacccatcacagcccggaacactggcatcatctgtaccattggcccagcttcccgatcagtggagacgttgaaggagatgattaagtctggaatgaatgtggctcgtctgaacttctctcatggaactcatgagtaccatgcggagaccatcaagaatgtgcgcacagccacggaaagctttgcttctgaccccatcctctaccggcccgttgctgtggctctagacactaaaggacctgagatccgaactgggctcatcaagggcagcggcactgcagaggtggagctgaagaagggagccactctcaaaatcacgctggataacgcctacatggaaaagtgtgacgagaacatcctgtggctggactacaagaacatctgcaaggtggtggaagtgggcagcaagatctacgtggatgatgggcttatttctctccaggtgaagcagaaaggtgccgacttcctggtgacggaggtggaaaatggtggctccttgggcagcaagaagggtgtgaaccttcctggggctgctgtggacttgcctgctgtgtcggagaaggacatccaggatctgaagtttggggtcgagcaggatgttgatatggtgtttgcgtcattcatccgcaaggcatctgatgtccatgaagttaggaaggtcctgggagagaagggaaagaacatcaagattatcagcaaaatcgagaatcatgagggggttcggaggtttgatgaaatcctggaggccagtgatgggatcatggtggctcgtggtgatctaggcattgagattcctgcagagaaggtcttccttgctcagaagatgatgattggacggtgcaaccgagctgggaagcctgtcatctgtgctactcagatgctggagagcatgatcaagaagccccgccccactcgggctgaaggcagtgatgtggccaatgcagtcctggatggagccgactgcatcatgctgtctggagaaacagccaaaggggactatcctctggaggctgtgcgcatgcagcacctgatagctcgtgaggctgaggcagccatgttccaccgcaagctgtttgaagaacttgtgcgagcctcaagtcactccacagacctcatggaagccatggccatgggcagcgtggaggcttcttataagtgtttagcagcagctttgatagttctgacggagtctggcaggtctgctcaccaggtggccagataccgcccacgtgcccccatcattgctgtgacccggaatccccagacagctcgtcaggcccacctgtaccgtggcatcttccctgtgctgtgcaaggacccagtccaggaggcctgggctgaggacgtggacctccgggtgaactttgccatgaatgttggcaaggcccgaggcttcttcaagaagggagatgtggtcattgtgctgaccggatggcgccctggctccggcttcaccaacaccatgcgtgttgttcctgtgccgtgatggaccccagagcccctcctccagcccctgtcccacccccttcccccagcccatccattaggccagcaacgcttgtagaactcactctgggctgtaacgtggcactggtaggttgggacaccagggaagaagatcaacgcctcactgaaacatggctgtgtttgcagcctgctctagtgggacagcccagagcctggctgcccatcatgtggccccacccaatcaagggaagaaggaggaatgctggactggaggcccctggagccagatggcaagagggtgacagcttcctttcctgtgtgtactctgtccagttcctttagaaaaaatggatgcccagaggactcccaaccctggcttggggtcaagaaacagccagcaagagttaggggccttagggcactgggctgttgttccattgaagccgactctggccctggcccttacttgcttctctagctctctaggcctctccagtttgcacctgtccccaccctccactcagctgtcctgcagcaaacactccaccctccaccttccattttcccccactactgcagcacctccaggcctgttgctatagagcctacctgtatgtcaataaacaacagctgaagcacccgccgcgcttcctcctgaaggtgactgcgcccgcggggacgcagggggcggggcccgggtcgcccggagccgggattgggcagagggcggggcggcggagggattgcggcggcccgcagcgggataaccttgaggctgaggcagtggctccttgcacagcagctgcacgcgccgtggctccggatctcttcgtctttgcagcgtagcccgagtcggtcagcgccggaggacctcagcagccatgtcgaagccccatagtgaagccgggactgccttcattcagacccagcagctgcacgcagccatggctgacacattcctggagcacatgtgccgcctggacattgattcaccacccatcacagcccggaacactggcatcatctgtaccattggcccagcttcccgatcagtggagacgttgaaggagatgattaagtctggaatgaatgtggctcgtctgaacttctctcatggaactcatgagtaccatgcggagaccatcaagaatgtgcgcacagccacggaaagctttgcttctgaccccatcctctaccggcccgttgctgtggctctagacactaaaggacctgagatccgaactgggctcatcaagggcagcggcactgcagaggtggagctgaagaagggagccactctcaaaatcacgctggataacgcctacatggaaaagtgtgacgagaacatcctgtggctggactacaagaacatctgcaaggtggtggaagtgggcagcaagatctacgtggatgatgggcttatttctctccaggtgaagcagaaaggtgccgacttcctggtgacggaggtggaaaatggtggctccttgggcagcaagaagggtgtgaaccttcctggggctgctgtggacttgcctgctgtgtcggagaaggacatccaggatctgaagtttggggtcgagcaggatgttgatatggtgtttgcgtcattcatccgcaaggcatctgatgtccatgaagttaggaaggtcctgggagagaagggaaagaacatcaagattatcagcaaaatcgagaatcatgagggggttcggaggtttgatgaaatcctggaggccagtgatgggatcatggtggctcgtggtgatctaggcattgagattcctgcagagaaggtcttccttgctcagaagatgatgattggacggtgcaaccgagctgggaagcctgtcatctgtgctactcagatgctggagagcatgatcaagaagccccgccccactcgggctgaaggcagtgatgtggccaatgcagtcctggatggagccgactgcatcatgctgtctggagaaacagccaaaggggactatcctctggaggctgtgcgcatgcagcacctgatagctcgtgaggctgaggcagccatgttccaccgcaagctgtttgaagaacttgtgcgagcctcaagtcactccacagacctcatggaagccatggccatgggcagcgtggaggcttcttataagtgtttagcagcagctttgatagttctgacggagtctggcaggtctgctcaccaggtggccagataccgcccacgtgcccccatcattgctgtgacccggaatccccagacagctcgtcaggcccacctgtaccgtggcatcttccctgtgctgtgcaaggacccagtccaggaggcctgggctgaggacgtggacctccgggtgaactttgccatgaatgttggcaaggcccgaggcttcttcaagaagggagatgtggtcattgtgctgaccggatggcgccctggctccggcttcaccaacaccatgcgtgttgttcctgtgccgtgatggaccccagagcccctcctccagcccctgtcccacccccttcccccagcccatccattaggccagcaacgcttgtagaactcactctgggctgtaacgtggcactggtaggttgggacaccagggaagaagatcaacgcctcactgaaacatggctgtgtttgcagcctgctctagtgggacagcccagagcctggctgcccatcatgtggccccacccaatcaagggaagaaggaggaatgctggactggaggcccctggagccagatggcaagagggtgacagcttcctttcctgtgtgtactctgtccagttcctttagaaaaaatggatgcccagaggactcccaaccctggcttggggtcaagaaacagccagcaagagttaggggccttagggcactgggctgttgttccattgaagccgactctggccctggcccttacttgcttctctagctctctaggcctctccagtttgcacctgtccccaccctccactcagctgtcctgcagcaaacactccaccctccaccttccattttcccccactactgcagcacctccaggcctgttgctatagagcctacctgtatgtcaataaacaacagctgaagcacccgccgcgcttcctcctgaaggtgactgcgcccgcggggacgcagggggcggggcccgggtcgcccggagccgggattgggcagagggcggggcggcggagggattgcggcggcccgcagcgggataaccttgaggctgaggcagtggctccttgcacagcagctgcacgcgccgtggctccggatctcttcgtctttgcagcgtagcccgagtcggtcagcgccggaggacctcagcagccatgtcgaagccccatagtgaagccgggactgccttcattcagacccagcagctgcacgcagccatggctgacacattcctggagcacatgtgccgcctggacattgattcaccacccatcacagcccggaacactggcatcatctgtaccattggcccagcttcccgatcagtggagacgttgaaggagatgattaagtctggaatgaatgtggctcgtctgaacttctctcatggaactcatgagtaccatgcggagaccatcaagaatgtgcgcacagccacggaaagctttgcttctgaccccatcctctaccggcccgttgctgtggctctagacactaaaggacctgagatccgaactgggctcatcaagggcagcggcactgcagaggtggagctgaagaagggagccactctcaaaatcacgctggataacgcctacatggaaaagtgtgacgagaacatcctgtggctggactacaagaacatctgcaaggtggtggaagtgggcagcaagatctacgtggatgatgggcttatttctctccaggtgaagcagaaaggtgccgacttcctggtgacggaggtggaaaatggtggctccttgggcagcaagaagggtgtgaaccttcctggggctgctgtggacttgcctgctgtgtcggagaaggacatccaggatctgaagtttggggtcgagcaggatgttgatatggtgtttgcgtcattcatccgcaaggcatctgatgtccatgaagttaggaaggtcctgggagagaagggaaagaacatcaagattatcagcaaaatcgagaatcatgagggggttcggaggtttgatgaaatcctggaggccagtgatgggatcatggtggctcgtggtgatctaggcattgagattcctgcagagaaggtcttccttgctcagaagatgatgattggacggtgcaaccgagctgggaagcctgtcatctgtgctactcagatgctggagagcatgatcaagaagccccgccccactcgggctgaaggcagtgatgtggccaatgcagtcctggatggagccgactgcatcatgctgtctggagaaacagccaaaggggactatcctctggaggctgtgcgcatgcagcacctgatagctcgtgaggctgaggcagccatgttccaccgcaagctgtttgaagaacttgtgcgagcctcaagtcactccacagacctcatggaagccatggccatgggcagcgtggaggcttcttataagtgtttagcagcagctttgatagttctgacggagtctggcaggtctgctcaccaggtggccagataccgcccacgtgcccccatcattgctgtgacccggaatccccagacagctcgtcaggcccacctgtaccgtggcatcttccctgtgctgtgcaaggacccagtccaggaggcctgggctgaggacgtggacctccgggtgaactttgccatgaatgttggcaaggcccgaggcttcttcaagaagggagatgtggtcattgtgctgaccggatggcgccctggctccggcttcaccaacaccatgcgtgttgttcctgtgccgtgatggaccccagagcccctcctccagcccctgtcccacccccttcccccagcccatccattaggccagcaacgcttgtagaactcactctgggctgtaacgtggcactggtaggttgggacaccagggaagaagatcaacgcctcactgaaacatggctgtgtttgcagcctgctctagtgggacagcccagagcctggctgcccatcatgtggccccacccaatcaagggaagaaggaggaatgctggactggaggcccctggagccagatggcaagagggtgacagcttcctttcctgtgtgtactctgtccagttcctttagaaaaaatggatgcccagaggactcccaaccctggcttggggtcaagaaacagccagcaagagttaggggccttagggcactgggctgttgttccattgaagccgactctggccctggcccttacttgcttctctagctctctaggcctctccagtttgcacctgtccccaccctccactcagctgtcctgcagcaaacactccaccctccaccttccattttcccccactactgcagcacctccaggcctgttgctatagagcctacctgtatgtcaataaacaacagctgaagcacc

SEQ ID NO: 974 - DNA, 10429 bp, Homo sapiens
  misc_feature (599)..(599): second gene starts at position 599
atgtccatccacttcagctccccggtattcacctcgcgctcagccgccttctcgggccgcggcgcccaggtgcgcctgagctccgctcgccccggcggccttggcagcagcagcctctacggcctcggcgcctcacggccgcgcgtggccgtgcgctctgcctatgggggcccggtgggcgccggcatccgcgaggtcaccattaaccagagcctgctggccccgctgcggctggacgccgacccctccctccagcgggtgcgccaggaggagagcgagcagatcaagaccctcaacaacaagtttgcctccttcatcgacaaggtgcggtttctggagcagcagaacaagctgctggagaccaagtggacgctgctgcaggagcagaagtcggccaagagcagccgcctcccagacatctttgaggcccagattgctggccttcggggtcagcttgaggcactgcaggtggatgggggccgcctggaggcggagctgcggagcatgcaggatgtggtggaggacttcaagaataagtacgaagatgaaattaaccaccgcacagctgctgagaatgagtttgtggtgctgaagaaggggagccactctcaaaatcacgctggataacgcctacatggaaaagtgtgacgagaacatcctgtggctggactacaagaacatctgcaaggtggtggaagtgggcagcaagatctacgtggatgatgggcttatttctctccaggtgaagcagaaaggtgccgacttcctggtgacggaggtggaaaatggtggctccttgggcagcaagaagggtgtgaaccttcctggggctgctgtggacttgcctgctgtgtcggagaaggacatccaggatctgaagtttggggtcgagcaggatgttgatatggtgtttgcgtcattcatccgcaaggcatctgatgtccatgaagttaggaaggtcctgggagagaagggaaagaacatcaagattatcagcaaaatcgagaatcatgagggggttcggaggtttgatgaaatcctggaggccagtgatgggatcatggtggctcgtggtgatctaggcattgagattcctgcagagaaggtcttccttgctcagaagatgatgattggacggtgcaaccgagctgggaagcctgtcatctgtgctactcagatgctggagagcatgatcaagaagccccgccccactcgggctgaaggcagtgatgtggccaatgcagtcctggatggagccgactgcatcatgctgtctggagaaacagccaaaggggactatcctctggaggctgtgcgcatgcagcacctgatagctcgtgaggctgaggcagccatgttccaccgcaagctgtttgaagaacttgtgcgagcctcaagtcactccacagacctcatggaagccatggccatgggcagcgtggaggcttcttataagtgtttagcagcagctttgatagttctgacggagtctggcaggtctgctcaccaggtggccagataccgcccacgtgcccccatcattgctgtgacccggaatccccagacagctcgtcaggcccacctgtaccgtggcatcttccctgtgctgtgcaaggacccagtccaggaggcctgggctgaggacgtggacctccgggtgaactttgccatgaatgttggcaaggcccgaggcttcttcaagaagggagatgtggtcattgtgctgaccggatggcgccctggctccggcttcaccaacaccatgcgtgttgttcctgtgccgtgatggaccccagagcccctcctccagcccctgtcccacccccttcccccagcccatccattaggccagcaacgcttgtagaactcactctgggctgtaacgtggcactggtaggttgggacaccagggaagaagatcaacgcctcactgaaacatggctgtgtttgcagcctgctctagtgggacagcccagagcctggctgcccatcatgtggccccacccaatcaagggaagaaggaggaatgctggactggaggcccctggagccagatggcaagagggtgacagcttcctttcctgtgtgtactctgtccagttcctttagaaaaaatggatgcccagaggactcccaaccctggcttggggtcaagaaacagccagcaagagttaggggccttagggcactgggctgttgttccattgaagccgactctggccctggcccttacttgcttctctagctctctaggcctctccagtttgcacctgtccccaccctccactcagctgtcctgcagcaaacactccaccctccaccttccattttcccccactactgcagcacctccaggcctgttgctatagagcctacctgtatgtcaataaacaacagctgaagcacccgccgcgcttcctcctgaaggtgactgcgcccgcggggacgcagggggcggggcccgggtcgcccggagccgggattgggcagagggcggggcggcggagggattgcggcggcccgcagcgggataaccttgaggctgaggcagtggctccttgcacagcagctgcacgcgccgtggctccggatctcttcgtctttgcagcgtagcccgagtcggtcagcgccggaggtgagcggtgcaggaggctacgccatcagtccccaccaagggccagtcgcccggctagtgcggaatcccggcgcgccggccggccccgggcacgcaggcagggcggcgcaggatccagggcgtctgggatgcagtggagctcagagagaggagaacggctcctcacgcctggggcctgctcttcagaagtccccagcgccgttccttccagatcaggacctcagcagccatgtcgaagccccatagtgaagccgggactgccttcattcagacccagcagctgcacgcagccatggctgacacattcctggagcacatgtgccgcctggacattgattcaccacccatcacagcccggaacactggcatcatctgtaccattggcccagcttcccgatcagtggagacgttgaaggagatgattaagtctggaatgaatgtggctcgtctgaacttctctcatggaactcatgagtaccatgcggagaccatcaagaatgtgcgcacagccacggaaagctttgcttctgaccccatcctctaccggcccgttgctgtggctctagacactaaaggacctgagatccgaactgggctcatcaagggcagcggcactgcagaggtggagctgaagaagggagccactctcaaaatcacgctggataacgcctacatggaaaagtgtgacgagaacatcctgtggctggactacaagaacatctgcaaggtggtggaagtgggcagcaagatctacgtggatgatgggcttatttctctccaggtgaagcagaaaggtgccgacttcctggtgacggaggtggaaaatggtggctccttgggcagcaagaagggtgtgaaccttcctggggctgctgtggacttgcctgctgtgtcggagaaggacatccaggatctgaagtttggggtcgagcaggatgttgatatggtgtttgcgtcattcatccgcaaggcatctgatgtccatgaagttaggaaggtcctgggagagaagggaaagaacatcaagattatcagcaaaatcgagaatcatgagggggttcggaggtttgatgaaatcctggaggccagtgatgggatcatggtggctcgtggtgatctaggcattgagattcctgcagagaaggtcttccttgctcagaagatgatgattggacggtgcaaccgagctgggaagcctgtcatctgtgctactcagatgctggagagcatgatcaagaagccccgccccactcgggctgaaggcagtgatgtggccaatgcagtcctggatggagccgactgcatcatgctgtctggagaaacagccaaaggggactatcctctggaggctgtgcgcatgcagcacctgatagctcgtgaggctgaggcagccatgttccaccgcaagctgtttgaagaacttgtgcgagcctcaagtcactccacagacctcatggaagccatggccatgggcagcgtggaggcttcttataagtgtttagcagcagctttgatagttctgacggagtctggcaggtctgctcaccaggtggccagataccgcccacgtgcccccatcattgctgtgacccggaatccccagacagctcgtcaggcccacctgtaccgtggcatcttccctgtgctgtgcaaggacccagtccaggaggcctgggctgaggacgtggacctccgggtgaactttgccatgaatgttggcaaggcccgaggcttcttcaagaagggagatgtggtcattgtgctgaccggatggcgccctggctccggcttcaccaacaccatgcgtgttgttcctgtgccgtgatggaccccagagcccctcctccagcccctgtcccacccccttcccccagcccatccattaggccagcaacgcttgtagaactcactctgggctgtaacgtggcactggtaggttgggacaccagggaagaagatcaacgcctcactgaaacatggctgtgtttgcagcctgctctagtgggacagcccagagcctggctgcccatcatgtggccccacccaatcaagggaagaaggaggaatgctggactggaggcccctggagccagatggcaagagggtgacagcttcctttcctgtgtgtactctgtccagttcctttagaaaaaatggatgcccagaggactcccaaccctggcttggggtcaagaaacagccagcaagagttaggggccttagggcactgggctgttgttccattgaagccgactctggccctggcccttacttgcttctctagctctctaggcctctccagtttgcacctgtccccaccctccactcagctgtcctgcagcaaacactccaccctccaccttccattttcccccactactgcagcacctccaggcctgttgctatagagcctacctgtatgtcaataaacaacagctgaagcacccgccgcgcttcctcctgaaggtgactgcgcccgcggggacgcagggggcggggcccgggtcgcccggagccgggattgggcagagggcggggcggcggagggattgcggcggcccgcagcgggataaccttgaggctgaggcagtggctccttgcacagcagctgcacgcgccgtggctccggatctcttcgtctttgcagcgtagcccgagtcggtcagcgccggaggtgagcggtgcaggaggctacgccatcagtccccaccaagggccagtcgcccggctagtgcggaatcccggcgcgccggccggccccgggcacgcaggcagggcggcgcaggatccagggcgtctgggatgcagtggagctcagagagaggagaacggctcctcacgcctggggcctgctcttcagaagtccccagcgccgttccttccagatcaggacctcagcagccatgtcgaagccccatagtgaagccgggactgccttcattcagacccagcagctgcacgcagccatggctgacacattcctggagcacatgtgccgcctggacattgattcaccacccatcacagcccggaacactggcatcatctgtaccattggcccagcttcccgatcagtggagacgttgaaggagatgattaagtctggaatgaatgtggctcgtctgaacttctctcatggaactcatgagtaccatgcggagaccatcaagaatgtgcgcacagccacggaaagctttgcttctgaccccatcctctaccggcccgttgctgtggctctagacactaaaggacctgagatccgaactgggctcatcaagggcagcggcactgcagaggtggagctgaagaagggagccactctcaaaatcacgctggataacgcctacatggaaaagtgtgacgagaacatcctgtggctggactacaagaacatctgcaaggtggtggaagtgggcagcaagatctacgtggatgatgggcttatttctctccaggtgaagcagaaaggtgccgacttcctggtgacggaggtggaaaatggtggctccttgggcagcaagaagggtgtgaaccttcctggggctgctgtggacttgcctgctgtgtcggagaaggacatccaggatctgaagtttggggtcgagcaggatgttgatatggtgtttgcgtcattcatccgcaaggcatctgatgtccatgaagttaggaaggtcctgggagagaagggaaagaacatcaagattatcagcaaaatcgagaatcatgagggggttcggaggtttgatgaaatcctggaggccagtgatgggatcatggtggctcgtggtgatctaggcattgagattcctgcagagaaggtcttccttgctcagaagatgatgattggacggtgcaaccgagctgggaagcctgtcatctgtgctactcagatgctggagagcatgatcaagaagccccgccccactcgggctgaaggcagtgatgtggccaatgcagtcctggatggagccgactgcatcatgctgtctggagaaacagccaaaggggactatcctctggaggctgtgcgcatgcagcacctgatagctcgtgaggctgaggcagccatgttccaccgcaagctgtttgaagaacttgtgcgagcctcaagtcactccacagacctcatggaagccatggccatgggcagcgtggaggcttcttataagtgtttagcagcagctttgatagttctgacggagtctggcaggtctgctcaccaggtggccagataccgcccacgtgcccccatcattgctgtgacccggaatccccagacagctcgtcaggcccacctgtaccgtggcatcttccctgtgctgtgcaaggacccagtccaggaggcctgggctgaggacgtggacctccgggtgaactttgccatgaatgttggcaaggcccgaggcttcttcaagaagggagatgtggtcattgtgctgaccggatggcgccctggctccggcttcaccaacaccatgcgtgttgttcctgtgccgtgatggaccccagagcccctcctccagcccctgtcccacccccttcccccagcccatccattaggccagcaacgcttgtagaactcactctgggctgtaacgtggcactggtaggttgggacaccagggaagaagatcaacgcctcactgaaacatggctgtgtttgcagcctgctctagtgggacagcccagagcctggctgcccatcatgtggccccacccaatcaagggaagaaggaggaatgctggactggaggcccctggagccagatggcaagagggtgacagcttcctttcctgtgtgtactctgtccagttcctttagaaaaaatggatgcccagaggactcccaaccctggcttggggtcaagaaacagccagcaagagttaggggccttagggcactgggctgttgttccattgaagccgactctggccctggcccttacttgcttctctagctctctaggcctctccagtttgcacctgtccccaccctccactcagctgtcctgcagcaaacactccaccctccaccttccattttcccccactactgcagcacctccaggcctgttgctatagagcctacctgtatgtcaataaacaacagctgaagcacccgccgcgcttcctcctgaaggtgactgcgcccgcggggacgcagggggcggggcccgggtcgcccggagccgggattgggcagagggcggggcggcggagggattgcggcggcccgcagcgggataaccttgaggctgaggcagtggctccttgcacagcagctgcacgcgccgtggctccggatctcttcgtctttgcagcgtagcccgagtcggtcagcgccggaggtgagcggtgcaggaggctacgccatcagtccccaccaagggccagtcgcccggctagtgcggaatcccggcgcgccggccggccccgggcacgcaggcagggcggcgcaggatccagggcgtctgggatgcagtggagctcagagagaggagaacggctcctcacgcctggggcctgctcttcagaagtccccagcgccgttccttccagatcaggacctcagcagccatgtcgaagccccatagtgaagccgggactgccttcattcagacccagcagctgcacgcagccatggctgacacattcctggagcacatgtgccgcctggacattgattcaccacccatcacagcccggaacactggcatcatctgtaccattggcccagcttcccgatcagtggagacgttgaaggagatgattaagtctggaatgaatgtggctcgtctgaacttctctcatggaactcatgagtaccatgcggagaccatcaagaatgtgcgcacagccacggaaagctttgcttctgaccccatcctctaccggcccgttgctgtggctctagacactaaaggacctgagatccgaactgggctcatcaagggcagcggcactgcagaggtggagctgaagaagggagccactctcaaaatcacgctggataacgcctacatggaaaagtgtgacgagaacatcctgtggctggactacaagaacatctgcaaggtggtggaagtgggcagcaagatctacgtggatgatgggcttatttctctccaggtgaagcagaaaggtgccgacttcctggtgacggaggtggaaaatggtggctccttgggcagcaagaagggtgtgaaccttcctggggctgctgtggacttgcctgctgtgtcggagaaggacatccaggatctgaagtttggggtcgagcaggatgttgatatggtgtttgcgtcattcatccgcaaggcatctgatgtccatgaagttaggaaggtcctgggagagaagggaaagaacatcaagattatcagcaaaatcgagaatcatgagggggttcggaggtttgatgaaatcctggaggccagtgatgggatcatggtggctcgtggtgatctaggcattgagattcctgcagagaaggtcttccttgctcagaagatgatgattggacggtgcaaccgagctgggaagcctgtcatctgtgctactcagatgctggagagcatgatcaagaagccccgccccactcgggctgaaggcagtgatgtggccaatgcagtcctggatggagccgactgcatcatgctgtctggagaaacagccaaaggggactatcctctggaggctgtgcgcatgcagcacctgatagctcgtgaggctgaggcagccatgttccaccgcaagctgtttgaagaacttgtgcgagcctcaagtcactccacagacctcatggaagccatggccatgggcagcgtggaggcttcttataagtgtttagcagcagctttgatagttctgacggagtctggcaggtctgctcaccaggtggccagataccgcccacgtgcccccatcattgctgtgacccggaatccccagacagctcgtcaggcccacctgtaccgtggcatcttccctgtgctgtgcaaggacccagtccaggaggcctgggctgaggacgtggacctccgggtgaactttgccatgaatgttggcaaggcccgaggcttcttcaagaagggagatgtggtcattgtgctgaccggatggcgccctggctccggcttcaccaacaccatgcgtgttgttcctgtgccgtgatggaccccagagcccctcctccagcccctgtcccacccccttcccccagcccatccattaggccagcaacgcttgtagaactcactctgggctgtaacgtggcactggtaggttgggacaccagggaagaagatcaacgcctcactgaaacatggctgtgtttgcagcctgctctagtgggacagcccagagcctggctgcccatcatgtggccccacccaatcaagggaagaaggaggaatgctggactggaggcccctggagccagatggcaagagggtgacagcttcctttcctgtgtgtactctgtccagttcctttagaaaaaatggatgcccagaggactcccaaccctggcttggggtcaagaaacagccagcaagagttaggggccttagggcactgggctgttgttccattgaagccgactctggccctggcccttacttgcttctctagctctctaggcctctccagtttgcacctgtccccaccctccactcagctgtcctgcagcaaacactccaccctccaccttccattttcccccactactgcagcacctccaggcctgttgctatagagcctacctgtatgtcaataaacaacagctgaagcacc

SEQ ID NO: 975 - DNA, 8088 bp, Homo sapiens
  misc_feature (623)..(623): second gene starts at position 623
atgtccatccacttcagctccccggtattcacctcgcgctcagccgccttctcgggccgcggcgcccaggtgcgcctgagctccgctcgccccggcggccttggcagcagcagcctctacggcctcggcgcctcacggccgcgcgtggccgtgcgctctgcctatgggggcccggtgggcgccggcatccgcgaggtcaccattaaccagagcctgctggccccgctgcggctggacgccgacccctccctccagcgggtgcgccaggaggagagcgagcagatcaagaccctcaacaacaagtttgcctccttcatcgacaaggtgcggtttctggagcagcagaacaagctgctggagaccaagtggacgctgctgcaggagcagaagtcggccaagagcagccgcctcccagacatctttgaggcccagattgctggccttcggggtcagcttgaggcactgcaggtggatgggggccgcctggaggcggagctgcggagcatgcaggatgtggtggaggacttcaagaataagtacgaagatgaaattaaccaccgcacagctgctgagaatgagtttgtggtgctgaagaaggatgtggatgctgcctacatgagcaggtgcttcagctgttgtttattgacatacaggtaggctctatagcaacaggcctggaggtgctgcagtagtgggggaaaatggaaggtggagggtggagtgtttgctgcaggacagctgagtggagggtggggacaggtgcaaactggagaggcctagagagctagagaagcaagtaagggccagggccagagtcggcttcaatggaacaacagcccagtgccctaaggcccctaactcttgctggctgtttcttgaccccaagccagggttgggagtcctctgggcatccattttttctaaaggaactggacagagtacacacaggaaaggaagctgtcaccctcttgccatctggctccaggggcctccagtccagcattcctccttcttcccttgattgggtggggccacatgatgggcagccaggctctgggctgtcccactagagcaggctgcaaacacagccatgtttcagtgaggcgttgatcttcttccctggtgtcccaacctaccagtgccacgttacagcccagagtgagttctacaagcgttgctggcctaatggatgggctgggggaagggggtgggacaggggctggaggaggggctctggggtccatcacggcacaggaacaacacgcatggtgttggtgaagccggagccagggcgccatccggtcagcacaatgaccacatctcccttcttgaagaagcctcgggccttgccaacattcatggcaaagttcacccggaggtccacgtcctcagcccaggcctcctggactgggtccttgcacagcacagggaagatgccacggtacaggtgggcctgacgagctgtctggggattccgggtcacagcaatgatgggggcacgtgggcggtatctggccacctggtgagcagacctgccagacttggtgaggacgattatggccccactgcagcacttgaaggaggcctccacggcacccacggcggtggcttctgtggggtcgctggtaatgggcgccaggcggcggagttcctcaaataattgcaagtggtagatggcagcctctgcctcacgggcaatcaggtgctgcatgcgcacagcctccagaggatagtcccctttggctgtttctccagacagcatgatgcagtcggctccatccaggactgcattggccacatcactgccttcagcccgagtggggcggggcttcttgatcatgctctccagcatctgagtagcacagatgacaggcttcccagctcggttgcaccgtccaatcatcatcttctgagcaaggaagaccttctctgcaggaatctcaatgcctagatcaccacgagccaccatgatcccatcactggcctccaggatttcatcaaacctccgaaccccctcatgattctcgattttgctgataatcttgatgttctttcccttctctcccaggaccttcctaacttcatggacatcagatgccttgcggatgaatgacgcaaacaccatatcaacatcctgctcgaccccaaacttcagatcctggatgtccttctccgacacagcaggcaagtccacagcagccccaggaaggttcacacccttcttgctgcccaaggagccaccattttccacctccgtcaccaggaagtcggcacctttctgcttcacctggagagaaataagcccatcatccacgtagatcttgctgcccacttccaccaccttgcagatgttcttgtagtccagccacaggatgttctcgtcacacttttccatgtaggcgttatccagcgtgattttgagagtggctcccttcttcagctccacctctgcagtgccgctgcccttgatgagcccagttcggatctcaggtcctttagtgtctagagccacagcaacgggccggtagaggatggggtcagaagcaaagctttccgtggctgtgcgcacattcttgatggtctccgcatggtactcatgagttccatgagagaagttcagacgagccacattcattccagacttaatcatctccttcaacgtctccactgatcgggaagctgggccaatggtacagatgatgccagtgttccgggctgtgatgggtggtgaatcaatgtccaggcggcacatgtgctccaggaatgtgtcagccatggctgcgtgcagctgctgggtctgaatgaaggcagtcccggcttcactatggggcttcgacatggctgctgaggtcctccggcgctgaccgactcgggctacgctgcaaagacgaagagatccggagccacggcgcgtgcagctgctgtgcaaggagccactgcctcagcctcaaggttatcccgctgcgggccgccgcaatccctccgccgccccgccctctgcccaatcccggctccgggcgacccgggccccgccccctgcgtccccgcgggcgcagtcaccttcaggaggaagcgcggcgggtgcttcagctgttgtttattgacatacaggtaggctctatagcaacaggcctggaggtgctgcagtagtgggggaaaatggaaggtggagggtggagtgtttgctgcaggacagctgagtggagggtggggacaggtgcaaactggagaggcctagagagctagagaagcaagtaagggccagggccagagtcggcttcaatggaacaacagcccagtgccctaaggcccctaactcttgctggctgtttcttgaccccaagccagggttgggagtcctctgggcatccattttttctaaaggaactggacagagtacacacaggaaaggaagctgtcaccctcttgccatctggctccaggggcctccagtccagcattcctccttcttcccttgattgggtggggccacatgatgggcagccaggctctgggctgtcccactagagcaggctgcaaacacagccatgtttcagtgaggcgttgatcttcttccctggtgtcccaacctaccagtgccacgttacagcccagagtgagttctacaagcgttgctggcctaatggatgggctgggggaagggggtgggacaggggctggaggaggggctctggggtccatcacggcacaggaacaacacgcatggtgttggtgaagccggagccagggcgccatccggtcagcacaatgaccacatctcccttcttgaagaagcctcgggccttgccaacattcatggcaaagttcacccggaggtccacgtcctcagcccaggcctcctggactgggtccttgcacagcacagggaagatgccacggtacaggtgggcctgacgagctgtctggggattccgggtcacagcaatgatgggggcacgtgggcggtatctggccacctggtgagcagacctgccagacttggtgaggacgattatggccccactgcagcacttgaaggaggcctccacggcacccacggcggtggcttctgtggggtcgctggtaatgggcgccaggcggcggagttcctcaaataattgcaagtggtagatggcagcctctgcctcacgggcaatcaggtgctgcatgcgcacagcctccagaggatagtcccctttggctgtttctccagacagcatgatgcagtcggctccatccaggactgcattggccacatcactgccttcagcccgagtggggcggggcttcttgatcatgctctccagcatctgagtagcacagatgacaggcttcccagctcggttgcaccgtccaatcatcatcttctgagcaaggaagaccttctctgcaggaatctcaatgcctagatcaccacgagccaccatgatcccatcactggcctccaggatttcatcaaacctccgaaccccctcatgattctcgattttgctgataatcttgatgttctttcccttctctcccaggaccttcctaacttcatggacatcagatgccttgcggatgaatgacgcaaacaccatatcaacatcctgctcgaccccaaacttcagatcctggatgtccttctccgacacagcaggcaagtccacagcagccccaggaaggttcacacccttcttgctgcccaaggagccaccattttccacctccgtcaccaggaagtcggcacctttctgcttcacctggagagaaataagcccatcatccacgtagatcttgctgcccacttccaccaccttgcagatgttcttgtagtccagccacaggatgttctcgtcacacttttccatgtaggcgttatccagcgtgattttgagagtggctcccttcttcagctccacctctgcagtgccgctgcccttgatgagcccagttcggatctcaggtcctttagtgtctagagccacagcaacgggccggtagaggatggggtcagaagcaaagctttccgtggctgtgcgcacattcttgatggtctccgcatggtactcatgagttccatgagagaagttcagacgagccacattcattccagacttaatcatctccttcaacgtctccactgatcgggaagctgggccaatggtacagatgatgccagtgttccgggctgtgatgggtggtgaatcaatgtccaggcggcacatgtgctccaggaatgtgtcagccatggctgcgtgcagctgctgggtctgaatgaaggcagtcccggcttcactatggggcttcgacatggctgctgaggtcctccggcgctgaccgactcgggctacgctgcaaagacgaagagatccggagccacggcgcgtgcagctgctgtgcaaggagccactgcctcagcctcaaggttatcccgctgcgggccgccgcaatccctccgccgccccgccctctgcccaatcccggctccgggcgacccgggccccgccccctgcgtccccgcgggcgcagtcaccttcaggaggaagcgcggcgggtgcttcagctgttgtttattgacatacaggtaggctctatagcaacaggcctggaggtgctgcagtagtgggggaaaatggaaggtggagggtggagtgtttgctgcaggacagctgagtggagggtggggacaggtgcaaactggagaggcctagagagctagagaagcaagtaagggccagggccagagtcggcttcaatggaacaacagcccagtgccctaaggcccctaactcttgctggctgtttcttgaccccaagccagggttgggagtcctctgggcatccattttttctaaaggaactggacagagtacacacaggaaaggaagctgtcaccctcttgccatctggctccaggggcctccagtccagcattcctccttcttcccttgattgggtggggccacatgatgggcagccaggctctgggctgtcccactagagcaggctgcaaacacagccatgtttcagtgaggcgttgatcttcttccctggtgtcccaacctaccagtgccacgttacagcccagagtgagttctacaagcgttgctggcctaatggatgggctgggggaagggggtgggacaggggctggaggaggggctctggggtccatcacggcacaggaacaacacgcatggtgttggtgaagccggagccagggcgccatccggtcagcacaatgaccacatctcccttcttgaagaagcctcgggccttgccaacattcatggcaaagttcacccggaggtccacgtcctcagcccaggcctcctggactgggtccttgcacagcacagggaagatgccacggtacaggtgggcctgacgagctgtctggggattccgggtcacagcaatgatgggggcacgtgggcggtatctggccacctggtgagcagacctgccagacttggtgaggacgattatggccccactgcagcacttgaaggaggcctccacggcacccacggcggtggcttctgtggggtcgctggtaatgggcgccaggcggcggagttcctcaaataattgcaagtggtagatggcagcctctgcctcacgggcaatcaggtgctgcatgcgcacagcctccagaggatagtcccctttggctgtttctccagacagcatgatgcagtcggctccatccaggactgcattggccacatcactgccttcagcccgagtggggcggggcttcttgatcatgctctccagcatctgagtagcacagatgacaggcttcccagctcggttgcaccgtccaatcatcatcttctgagcaaggaagaccttctctgcaggaatctcaatgcctagatcaccacgagccaccatgatcccatcactggcctccaggatttcatcaaacctccgaaccccctcatgattctcgattttgctgataatcttgatgttctttcccttctctcccaggaccttcctaacttcatggacatcagatgccttgcggatgaatgacgcaaacaccatatcaacatcctgctcgaccccaaacttcagatcctggatgtccttctccgacacagcaggcaagtccacagcagccccaggaaggttcacacccttcttgctgcccaaggagccaccattttccacctccgtcaccaggaagtcggcacctttctgcttcacctggagagaaataagcccatcatccacgtagatcttgctgcccacttccaccaccttgcagatgttcttgtagtccagccacaggatgttctcgtcacacttttccatgtaggcgttatccagcgtgattttgagagtggctcccttcttcagctccacctctgcagtgccgctgcccttgatgagcccagttcggatctcaggtcctttagtgtctagagccacagcaacgggccggtagaggatggggtcagaagcaaagctttccgtggctgtgcgcacattcttgatggtctccgcatggtactcatgagttccatgagagaagttcagacgagccacattcattccagacttaatcatctccttcaacgtctccactgatcgggaagctgggccaatggtacagatgatgccagtgttccgggctgtgatgggtggtgaatcaatgtccaggcggcacatgtgctccaggaatgtgtcagccatggctgcgtgcagctgctgggtctgaatgaaggcagtcccggcttcactatggggcttcgacatggctgctgaggtcctccggcgctgaccgactcgggctacgctgcaaagacgaagagatccggagccacggcgcgtgcagctgctgtgcaaggagccactgcctcagcctcaaggttatcccgctgcgggccgccgcaatccctccgccgccccgccctctgcccaatcccggctccgggcgacccgggccccgccccctgcgtccccgcgggcgcagtcaccttcaggaggaagcgcggcgggtgcttcagctgttgtttattgacatacaggtaggctctatagcaacaggcctggaggtgctgcagtagtgggggaaaatggaaggtggag

SEQ ID NO: 976 - DNA, 8088 bp, Homo sapiens
  misc_feature (623)..(623): second gene starts at position 623
atgtccatccacttcagctccccggtattcacctcgcgctcagccgccttctcgggccgcggcgcccaggtgcgcctgagctccgctcgccccggcggccttggcagcagcagcctctacggcctcggcgcctcacggccgcgcgtggccgtgcgctctgcctatgggggcccggtgggcgccggcatccgcgaggtcaccattaaccagagcctgctggccccgctgcggctggacgccgacccctccctccagcgggtgcgccaggaggagagcgagcagatcaagaccctcaacaacaagtttgcctccttcatcgacaaggtgcggtttctggagcagcagaacaagctgctggagaccaagtggacgctgctgcaggagcagaagtcggccaagagcagccgcctcccagacatctttgaggcccagattgctggccttcggggtcagcttgaggcactgcaggtggatgggggccgcctggaggcggagctgcggagcatgcaggatgtggtggaggacttcaagaataagtacgaagatgaaattaaccaccgcacagctgctgagaatgagtttgtggtgctgaagaaggatgtggatgctgcctacatgagcaggtgcttcagctgttgtttattgacatacaggtaggctctatagcaacaggcctggaggtgctgcagtagtgggggaaaatggaaggtggagggtggagtgtttgctgcaggacagctgagtggagggtggggacaggtgcaaactggagaggcctagagagctagagaagcaagtaagggccagggccagagtcggcttcaatggaacaacagcccagtgccctaaggcccctaactcttgctggctgtttcttgaccccaagccagggttgggagtcctctgggcatccattttttctaaaggaactggacagagtacacacaggaaaggaagctgtcaccctcttgccatctggctccaggggcctccagtccagcattcctccttcttcccttgattgggtggggccacatgatgggcagccaggctctgggctgtcccactagagcaggctgcaaacacagccatgtttcagtgaggcgttgatcttcttccctggtgtcccaacctaccagtgccacgttacagcccagagtgagttctacaagcgttgctggcctaatggatgggctgggggaagggggtgggacaggggctggaggaggggctctggggtccatcacggcacaggaacaacacgcatggtgttggtgaagccggagccagggcgccatccggtcagcacaatgaccacatctcccttcttgaagaagcctcgggccttgccaacattcatggcaaagttcacccggaggtccacgtcctcagcccaggcctcctggactgggtccttgcacagcacagggaagatgccacggtacaggtgggcctgacgagctgtctggggattccgggtcacagcaatgatgggggcacgtgggcggtatctggccacctggtgagcagacctgccagactccgtcagaactatcaaagctgctgctaaacacttataagaagcctccacgctgcccatggccatggcttccatgaggtctgtggagtgacttgaggctcgcacaagttcttcaaacagcttgcggtggaacatggctgcctcagcctcacgagctatcaggtgctgcatgcgcacagcctccagaggatagtcccctttggctgtttctccagacagcatgatgcagtcggctccatccaggactgcattggccacatcactgccttcagcccgagtggggcggggcttcttgatcatgctctccagcatctgagtagcacagatgacaggcttcccagctcggttgcaccgtccaatcatcatcttctgagcaaggaagaccttctctgcaggaatctcaatgcctagatcaccacgagccaccatgatcccatcactggcctccaggatttcatcaaacctccgaaccccctcatgattctcgattttgctgataatcttgatgttctttcccttctctcccaggaccttcctaacttcatggacatcagatgccttgcggatgaatgacgcaaacaccatatcaacatcctgctcgaccccaaacttcagatcctggatgtccttctccgacacagcaggcaagtccacagcagccccaggaaggttcacacccttcttgctgcccaaggagccaccattttccacctccgtcaccaggaagtcggcacctttctgcttcacctggagagaaataagcccatcatccacgtagatcttgctgcccacttccaccaccttgcagatgttcttgtagtccagccacaggatgttctcgtcacacttttccatgtaggcgttatccagcgtgattttgagagtggctcccttcttcagctccacctctgcagtgccgctgcccttgatgagcccagttcggatctcaggtcctttagtgtctagagccacagcaacgggccggtagaggatggggtcagaagcaaagctttccgtggctgtgcgcacattcttgatggtctccgcatggtactcatgagttccatgagagaagttcagacgagccacattcattccagacttaatcatctccttcaacgtctccactgatcgggaagctgggccaatggtacagatgatgccagtgttccgggctgtgatgggtggtgaatcaatgtccaggcggcacatgtgctccaggaatgtgtcagccatggctgcgtgcagctgctgggtctgaatgaaggcagtcccggcttcactatggggcttcgacatggctgctgaggtcctccggcgctgaccgactcgggctacgctgcaaagacgaagagatccggagccacggcgcgtgcagctgctgtgcaaggagccactgcctcagcctcaaggttatcccgctgcgggccgccgcaatccctccgccgccccgccctctgcccaatcccggctccgggcgacccgggccccgccccctgcgtccccgcgggcgcagtcaccttcaggaggaagcgcggcgggtgcttcagctgttgtttattgacatacaggtaggctctatagcaacaggcctggaggtgctgcagtagtgggggaaaatggaaggtggagggtggagtgtttgctgcaggacagctgagtggagggtggggacaggtgcaaactggagaggcctagagagctagagaagcaagtaagggccagggccagagtcggcttcaatggaacaacagcccagtgccctaaggcccctaactcttgctggctgtttcttgaccccaagccagggttgggagtcctctgggcatccattttttctaaaggaactggacagagtacacacaggaaaggaagctgtcaccctcttgccatctggctccaggggcctccagtccagcattcctccttcttcccttgattgggtggggccacatgatgggcagccaggctctgggctgtcccactagagcaggctgcaaacacagccatgtttcagtgaggcgttgatcttcttccctggtgtcccaacctaccagtgccacgttacagcccagagtgagttctacaagcgttgctggcctaatggatgggctgggggaagggggtgggacaggggctggaggaggggctctggggtccatcacggcacaggaacaacacgcatggtgttggtgaagccggagccagggcgccatccggtcagcacaatgaccacatctcccttcttgaagaagcctcgggccttgccaacattcatggcaaagttcacccggaggtccacgtcctcagcccaggcctcctggactgggtccttgcacagcacagggaagatgccacggtacaggtgggcctgacgagctgtctggggattccgggtcacagcaatgatgggggcacgtgggcggtatctggccacctggtgagcagacctgccagactccgtcagaactatcaaagctgctgctaaacacttataagaagcctccacgctgcccatggccatggcttccatgaggtctgtggagtgacttgaggctcgcacaagttcttcaaacagcttgcggtggaacatggctgcctcagcctcacgagctatcaggtgctgcatgcgcacagcctccagaggatagtcccctttggctgtttctccagacagcatgatgcagtcggctccatccaggactgcattggccacatcactgccttcagcccgagtggggcggggcttcttgatcatgctctccagcatctgagtagcacagatgacaggcttcccagctcggttgcaccgtccaatcatcatcttctgagcaaggaagaccttctctgcaggaatctcaatgcctagatcaccacgagccaccatgatcccatcactggcctccaggatttcatcaaacctccgaaccccctcatgattctcgattttgctgataatcttgatgttctttcccttctctcccaggaccttcctaacttcatggacatcagatgccttgcggatgaatgacgcaaacaccatatcaacatcctgctcgaccccaaacttcagatcctggatgtccttctccgacacagcaggcaagtccacagcagccccaggaaggttcacacccttcttgctgcccaaggagccaccattttccacctccgtcaccaggaagtcggcacctttctgcttcacctggagagaaataagcccatcatccacgtagatcttgctgcccacttccaccaccttgcagatgttcttgtagtccagccacaggatgttctcgtcacacttttccatgtaggcgttatccagcgtgattttgagagtggctcccttcttcagctccacctctgcagtgccgctgcccttgatgagcccagttcggatctcaggtcctttagtgtctagagccacagcaacgggccggtagaggatggggtcagaagcaaagctttccgtggctgtgcgcacattcttgatggtctccgcatggtactcatgagttccatgagagaagttcagacgagccacattcattccagacttaatcatctccttcaacgtctccactgatcgggaagctgggccaatggtacagatgatgccagtgttccgggctgtgatgggtggtgaatcaatgtccaggcggcacatgtgctccaggaatgtgtcagccatggctgcgtgcagctgctgggtctgaatgaaggcagtcccggcttcactatggggcttcgacatggctgctgaggtcctccggcgctgaccgactcgggctacgctgcaaagacgaagagatccggagccacggcgcgtgcagctgctgtgcaaggagccactgcctcagcctcaaggttatcccgctgcgggccgccgcaatccctccgccgccccgccctctgcccaatcccggctccgggcgacccgggccccgccccctgcgtccccgcgggcgcagtcaccttcaggaggaagcgcggcgggtgcttcagctgttgtttattgacatacaggtaggctctatagcaacaggcctggaggtgctgcagtagtgggggaaaatggaaggtggagggtggagtgtttgctgcaggacagctgagtggagggtggggacaggtgcaaactggagaggcctagagagctagagaagcaagtaagggccagggccagagtcggcttcaatggaacaacagcccagtgccctaaggcccctaactcttgctggctgtttcttgaccccaagccagggttgggagtcctctgggcatccattttttctaaaggaactggacagagtacacacaggaaaggaagctgtcaccctcttgccatctggctccaggggcctccagtccagcattcctccttcttcccttgattgggtggggccacatgatgggcagccaggctctgggctgtcccactagagcaggctgcaaacacagccatgtttcagtgaggcgttgatcttcttccctggtgtcccaacctaccagtgccacgttacagcccagagtgagttctacaagcgttgctggcctaatggatgggctgggggaagggggtgggacaggggctggaggaggggctctggggtccatcacggcacaggaacaacacgcatggtgttggtgaagccggagccagggcgccatccggtcagcacaatgaccacatctcccttcttgaagaagcctcgggccttgccaacattcatggcaaagttcacccggaggtccacgtcctcagcccaggcctcctggactgggtccttgcacagcacagggaagatgccacggtacaggtgggcctgacgagctgtctggggattccgggtcacagcaatgatgggggcacgtgggcggtatctggccacctggtgagcagacctgccagactccgtcagaactatcaaagctgctgctaaacacttataagaagcctccacgctgcccatggccatggcttccatgaggtctgtggagtgacttgaggctcgcacaagttcttcaaacagcttgcggtggaacatggctgcctcagcctcacgagctatcaggtgctgcatgcgcacagcctccagaggatagtcccctttggctgtttctccagacagcatgatgcagtcggctccatccaggactgcattggccacatcactgccttcagcccgagtggggcggggcttcttgatcatgctctccagcatctgagtagcacagatgacaggcttcccagctcggttgcaccgtccaatcatcatcttctgagcaaggaagaccttctctgcaggaatctcaatgcctagatcaccacgagccaccatgatcccatcactggcctccaggatttcatcaaacctccgaaccccctcatgattctcgattttgctgataatcttgatgttctttcccttctctcccaggaccttcctaacttcatggacatcagatgccttgcggatgaatgacgcaaacaccatatcaacatcctgctcgaccccaaacttcagatcctggatgtccttctccgacacagcaggcaagtccacagcagccccaggaaggttcacacccttcttgctgcccaaggagccaccattttccacctccgtcaccaggaagtcggcacctttctgcttcacctggagagaaataagcccatcatccacgtagatcttgctgcccacttccaccaccttgcagatgttcttgtagtccagccacaggatgttctcgtcacacttttccatgtaggcgttatccagcgtgattttgagagtggctcccttcttcagctccacctctgcagtgccgctgcccttgatgagcccagttcggatctcaggtcctttagtgtctagagccacagcaacgggccggtagaggatggggtcagaagcaaagctttccgtggctgtgcgcacattcttgatggtctccgcatggtactcatgagttccatgagagaagttcagacgagccacattcattccagacttaatcatctccttcaacgtctccactgatcgggaagctgggccaatggtacagatgatgccagtgttccgggctgtgatgggtggtgaatcaatgtccaggcggcacatgtgctccaggaatgtgtcagccatggctgcgtgcagctgctgggtctgaatgaaggcagtcccggcttcactatggggcttcgacatggctgctgaggtcctccggcgctgaccgactcgggctacgctgcaaagacgaagagatccggagccacggcgcgtgcagctgctgtgcaaggagccactgcctcagcctcaaggttatcccgctgcgggccgccgcaatccctccgccgccccgccctctgcccaatcccggctccgggcgacccgggccccgccccctgcgtccccgcgggcgcagtcaccttcaggaggaagcgcggcgggtgcttcagctgttgtttattgacatacaggtaggctctatagcaacaggcctggaggtgctgcagtagtgggggaaaatggaaggtggag

SEQ ID NO: 977 - DNA, 8736 bp, Homo sapiens
  misc_feature (623)..(623): second gene starts at position 623
atgtccatccacttcagctccccggtattcacctcgcgctcagccgccttctcgggccgcggcgcccaggtgcgcctgagctccgctcgccccggcggccttggcagcagcagcctctacggcctcggcgcctcacggccgcgcgtggccgtgcgctctgcctatgggggcccggtgggcgccggcatccgcgaggtcaccattaaccagagcctgctggccccgctgcggctggacgccgacccctccctccagcgggtgcgccaggaggagagcgagcagatcaagaccctcaacaacaagtttgcctccttcatcgacaaggtgcggtttctggagcagcagaacaagctgctggagaccaagtggacgctgctgcaggagcagaagtcggccaagagcagccgcctcccagacatctttgaggcccagattgctggccttcggggtcagcttgaggcactgcaggtggatgggggccgcctggaggcggagctgcggagcatgcaggatgtggtggaggacttcaagaataagtacgaagatgaaattaaccaccgcacagctgctgagaatgagtttgtggtgctgaagaaggatgtggatgctgcctacatgagcaggtgcttcagctgttgtttattgacatacaggtaggctctatagcaacaggcctggaggtgctgcagtagtgggggaaaatggaaggtggagggtggagtgtttgctgcaggacagctgagtggagggtggggacaggtgcaaactggagaggcctagagagctagagaagcaagtaagggccagggccagagtcggcttcaatggaacaacagcccagtgccctaaggcccctaactcttgctggctgtttcttgaccccaagccagggttgggagtcctctgggcatccattttttctaaaggaactggacagagtacacacaggaaaggaagctgtcaccctcttgccatctggctccaggggcctccagtccagcattcctccttcttcccttgattgggtggggccacatgatgggcagccaggctctgggctgtcccactagagcaggctgcaaacacagccatgtttcagtgaggcgttgatcttcttccctggtgtcccaacctaccagtgccacgttacagcccagagtgagttctacaagcgttgctggcctaatggatgggctgggggaagggggtgggacaggggctggaggaggggctctggggtccatcacggcacaggaacaacacgcatggtgttggtgaagccggagccagggcgccatccggtcagcacaatgaccacatctcccttcttgaagaagcctcgggccttgccaacattcatggcaaagttcacccggaggtccacgtcctcagcccaggcctcctggactgggtccttgcacagcacagggaagatgccacggtacaggtgggcctgacgagctgtctggggattccgggtcacagcaatgatgggggcacgtgggcggtatctggccacctggtgagcagacctgccagactccgtcagaactatcaaagctgctgctaaacacttataagaagcctccacgctgcccatggccatggcttccatgaggtctgtggagtgacttgaggctcgcacaagttcttcaaacagcttgcggtggaacatggctgcctcagcctcacgagctatcaggtgctgcatgcgcacagcctccagaggatagtcccctttggctgtttctccagacagcatgatgcagtcggctccatccaggactgcattggccacatcactgccttcagcccgagtggggcggggcttcttgatcatgctctccagcatctgagtagcacagatgacaggcttcccagctcggttgcaccgtccaatcatcatcttctgagcaaggaagaccttctctgcaggaatctcaatgcctagatcaccacgagccaccatgatcccatcactggcctccaggatttcatcaaacctccgaaccccctcatgattctcgattttgctgataatcttgatgttctttcccttctctcccaggaccttcctaacttcatggacatcagatgccttgcggatgaatgacgcaaacaccatatcaacatcctgctcgaccccaaacttcagatcctggatgtccttctccgacacagcaggcaagtccacagcagccccaggaaggttcacacccttcttgctgcccaaggagccaccattttccacctccgtcaccaggaagtcggcacctttctgcttcacctggagagaaataagcccatcatccacgtagatcttgctgcccacttccaccaccttgcagatgttcttgtagtccagccacaggatgttctcgtcacacttttccatgtaggcgttatccagcgtgattttgagagtggctcccttcttcagctccacctctgcagtgccgctgcccttgatgagcccagttcggatctcaggtcctttagtgtctagagccacagcaacgggccggtagaggatggggtcagaagcaaagctttccgtggctgtgcgcacattcttgatggtctccgcatggtactcatgagttccatgagagaagttcagacgagccacattcattccagacttaatcatctccttcaacgtctccactgatcgggaagctgggccaatggtacagatgatgccagtgttccgggctgtgatgggtggtgaatcaatgtccaggcggcacatgtgctccaggaatgtgtcagccatggctgcgtgcagctgctgggtctgaatgaaggcagtcccggcttcactatggggcttcgacatggctgctgaggtcctgatctggaaggaacggcgctggggacttctgaagagcaggccccaggcgtgaggagccgttctcctctctctgagctccactgcatcccagacgccctggatcctgcgccgccctgcctgcgtgcccggggccggccggcgcgccgggattccgcactagccgggcgactggcccttggtggggactgatggcgtagcctcctgcaccgctcacctccggcgctgaccgactcgggctacgctgcaaagacgaagagatccggagccacggcgcgtgcagctgctgtgcaaggagccactgcctcagcctcaaggttatcccgctgcgggccgccgcaatccctccgccgccccgccctctgcccaatcccggctccgggcgacccgggccccgccccctgcgtccccgcgggcgcagtcaccttcaggaggaagcgcggcgggtgcttcagctgttgtttattgacatacaggtaggctctatagcaacaggcctggaggtgctgcagtagtgggggaaaatggaaggtggagggtggagtgtttgctgcaggacagctgagtggagggtggggacaggtgcaaactggagaggcctagagagctagagaagcaagtaagggccagggccagagtcggcttcaatggaacaacagcccagtgccctaaggcccctaactcttgctggctgtttcttgaccccaagccagggttgggagtcctctgggcatccattttttctaaaggaactggacagagtacacacaggaaaggaagctgtcaccctcttgccatctggctccaggggcctccagtccagcattcctccttcttcccttgattgggtggggccacatgatgggcagccaggctctgggctgtcccactagagcaggctgcaaacacagccatgtttcagtgaggcgttgatcttcttccctggtgtcccaacctaccagtgccacgttacagcccagagtgagttctacaagcgttgctggcctaatggatgggctgggggaagggggtgggacaggggctggaggaggggctctggggtccatcacggcacaggaacaacacgcatggtgttggtgaagccggagccagggcgccatccggtcagcacaatgaccacatctcccttcttgaagaagcctcgggccttgccaacattcatggcaaagttcacccggaggtccacgtcctcagcccaggcctcctggactgggtccttgcacagcacagggaagatgccacggtacaggtgggcctgacgagctgtctggggattccgggtcacagcaatgatgggggcacgtgggcggtatctggccacctggtgagcagacctgccagactccgtcagaactatcaaagctgctgctaaacacttataagaagcctccacgctgcccatggccatggcttccatgaggtctgtggagtgacttgaggctcgcacaagttcttcaaacagcttgcggtggaacatggctgcctcagcctcacgagctatcaggtgctgcatgcgcacagcctccagaggatagtcccctttggctgtttctccagacagcatgatgcagtcggctccatccaggactgcattggccacatcactgccttcagcccgagtggggcggggcttcttgatcatgctctccagcatctgagtagcacagatgacaggcttcccagctcggttgcaccgtccaatcatcatcttctgagcaaggaagaccttctctgcaggaatctcaatgcctagatcaccacgagccaccatgatcccatcactggcctccaggatttcatcaaacctccgaaccccctcatgattctcgattttgctgataatcttgatgttctttcccttctctcccaggaccttcctaacttcatggacatcagatgccttgcggatgaatgacgcaaacaccatatcaacatcctgctcgaccccaaacttcagatcctggatgtccttctccgacacagcaggcaagtccacagcagccccaggaaggttcacacccttcttgctgcccaaggagccaccattttccacctccgtcaccaggaagtcggcacctttctgcttcacctggagagaaataagcccatcatccacgtagatcttgctgcccacttccaccaccttgcagatgttcttgtagtccagccacaggatgttctcgtcacacttttccatgtaggcgttatccagcgtgattttgagagtggctcccttcttcagctccacctctgcagtgccgctgcccttgatgagcccagttcggatctcaggtcctttagtgtctagagccacagcaacgggccggtagaggatggggtcagaagcaaagctttccgtggctgtgcgcacattcttgatggtctccgcatggtactcatgagttccatgagagaagttcagacgagccacattcattccagacttaatcatctccttcaacgtctccactgatcgggaagctgggccaatggtacagatgatgccagtgttccgggctgtgatgggtggtgaatcaatgtccaggcggcacatgtgctccaggaatgtgtcagccatggctgcgtgcagctgctgggtctgaatgaaggcagtcccggcttcactatggggcttcgacatggctgctgaggtcctgatctggaaggaacggcgctggggacttctgaagagcaggccccaggcgtgaggagccgttctcctctctctgagctccactgcatcccagacgccctggatcctgcgccgccctgcctgcgtgcccggggccggccggcgcgccgggattccgcactagccgggcgactggcccttggtggggactgatggcgtagcctcctgcaccgctcacctccggcgctgaccgactcgggctacgctgcaaagacgaagagatccggagccacggcgcgtgcagctgctgtgcaaggagccactgcctcagcctcaaggttatcccgctgcgggccgccgcaatccctccgccgccccgccctctgcccaatcccggctccgggcgacccgggccccgccccctgcgtccccgcgggcgcagtcaccttcaggaggaagcgcggcgggtgcttcagctgttgtttattgacatacaggtaggctctatagcaacaggcctggaggtgctgcagtagtgggggaaaatggaaggtggagggtggagtgtttgctgcaggacagctgagtggagggtggggacaggtgcaaactggagaggcctagagagctagagaagcaagtaagggccagggccagagtcggcttcaatggaacaacagcccagtgccctaaggcccctaactcttgctggctgtttcttgaccccaagccagggttgggagtcctctgggcatccattttttctaaaggaactggacagagtacacacaggaaaggaagctgtcaccctcttgccatctggctccaggggcctccagtccagcattcctccttcttcccttgattgggtggggccacatgatgggcagccaggctctgggctgtcccactagagcaggctgcaaacacagccatgtttcagtgaggcgttgatcttcttccctggtgtcccaacctaccagtgccacgttacagcccagagtgagttctacaagcgttgctggcctaatggatgggctgggggaagggggtgggacaggggctggaggaggggctctggggtccatcacggcacaggaacaacacgcatggtgttggtgaagccggagccagggcgccatccggtcagcacaatgaccacatctcccttcttgaagaagcctcgggccttgccaacattcatggcaaagttcacccggaggtccacgtcctcagcccaggcctcctggactgggtccttgcacagcacagggaagatgccacggtacaggtgggcctgacgagctgtctggggattccgggtcacagcaatgatgggggcacgtgggcggtatctggccacctggtgagcagacctgccagactccgtcagaactatcaaagctgctgctaaacacttataagaagcctccacgctgcccatggccatggcttccatgaggtctgtggagtgacttgaggctcgcacaagttcttcaaacagcttgcggtggaacatggctgcctcagcctcacgagctatcaggtgctgcatgcgcacagcctccagaggatagtcccctttggctgtttctccagacagcatgatgcagtcggctccatccaggactgcattggccacatcactgccttcagcccgagtggggcggggcttcttgatcatgctctccagcatctgagtagcacagatgacaggcttcccagctcggttgcaccgtccaatcatcatcttctgagcaaggaagaccttctctgcaggaatctcaatgcctagatcaccacgagccaccatgatcccatcactggcctccaggatttcatcaaacctccgaaccccctcatgattctcgattttgctgataatcttgatgttctttcccttctctcccaggaccttcctaacttcatggacatcagatgccttgcggatgaatgacgcaaacaccatatcaacatcctgctcgaccccaaacttcagatcctggatgtccttctccgacacagcaggcaagtccacagcagccccaggaaggttcacacccttcttgctgcccaaggagccaccattttccacctccgtcaccaggaagtcggcacctttctgcttcacctggagagaaataagcccatcatccacgtagatcttgctgcccacttccaccaccttgcagatgttcttgtagtccagccacaggatgttctcgtcacacttttccatgtaggcgttatccagcgtgattttgagagtggctcccttcttcagctccacctctgcagtgccgctgcccttgatgagcccagttcggatctcaggtcctttagtgtctagagccacagcaacgggccggtagaggatggggtcagaagcaaagctttccgtggctgtgcgcacattcttgatggtctccgcatggtactcatgagttccatgagagaagttcagacgagccacattcattccagacttaatcatctccttcaacgtctccactgatcgggaagctgggccaatggtacagatgatgccagtgttccgggctgtgatgggtggtgaatcaatgtccaggcggcacatgtgctccaggaatgtgtcagccatggctgcgtgcagctgctgggtctgaatgaaggcagtcccggcttcactatggggcttcgacatggctgctgaggtcctgatctggaaggaacggcgctggggacttctgaagagcaggccccaggcgtgaggagccgttctcctctctctgagctccactgcatcccagacgccctggatcctgcgccgccctgcctgcgtgcccggggccggccggcgcgccgggattccgcactagccgggcgactggcccttggtggggactgatggcgtagcctcctgcaccgctcacctccggcgctgaccgactcgggctacgctgcaaagacgaagagatccggagccacggcgcgtgcagctgctgtgcaaggagccactgcctcagcctcaaggttatcccgctgcgggccgccgcaatccctccgccgccccgccctctgcccaatcccggctccgggcgacccgggccccgccccctgcgtccccgcgggcgcagtcaccttcaggaggaagcgcggcgggtgcttcagctgttgtttattgacatacaggtaggctctatagcaacaggcctggaggtgctgcagtagtgggggaaaatggaaggtggag

SEQ ID NO: 978 - DNA, 10588 bp, Homo sapiens
  misc_feature (654)..(654): second gene starts at position 654
atggatggccgagacttcgggccccagcggtccgtgcacggtcccccgccgccgctgctgtccggcctggccatggacagccaccgcgtgggcgcggccactgccggacgcttgcccgcctcgggcttgcccggcccgctgccgcccgggaagtacatggccggcctgaatctccatccgcacccgggcgaggccttcttgggcagctttgtggccagcgggatggggccctcggcctcgtcccatgggagcccagtgccactgccctctgacctgtctttccgctccccaacccctagcaacctgcccatggtgcagctgtgggccgcccacgcccatgaaggcttctcccacctgcccagtgggctgtacccatcctacctccacctgaaccacctggagccccccagcagtgggagccccctcctcagccagctgggtcagcccagcattttcgatacccagaaaggtcaggggccaggaggagacggtttctacctgcccaccgcgggggctccgggctccctgcactctcacgcgccctcggcccggacccctggcggcggccactcctcgggcgccccggccaaaggctcgtcgtcgcgggacggtccagccaaggagcgggcgggccgcggcggggagccgcctccgcttttcggcaagaaggacccgcgcgcccggggcgaggaggcctcggggccacggggcgtggtggacctgacccaggaggcgcgcgccgagggccgccaggaccgggggcccccgcgcctggctgagcgcctgtcgcccttcctggctgagtccaagaccaagaatgcggcgctgcagccgtcggtactgaccatgtgcaacggcggcgccggggacgtggggctgcccgcgctggtggccgaagcggggcgcgggggtgccaaggaggctgcccggcaggacgagggcgcgcggctgctgcggcgcacggagaccctgctccctgggccgcgcccctgcccctcaccgctgcccccgccgcccgcgccccccaaggggcctcctgcaccccccgcggccacccccgccggcgtctacaccgtcttccgcgagcagggccgtgagcaccgcgtggtggcgcccaccttcgtgccttccgtggaggccttcgacgagcgcccggggcccatccagatcgcatcccaggcgcgcgatgcccgggcccgcgagcgcgaggctggcaggccaggggtcctgcaggcgccccccggctccccgcggcctctggaccggcccgagggcctgcgcgagaagaactcggtcatccgctcgctcaagcggccgccccccgcggatgcccccacggtgcgggccacacgcgcctccccggacccccgcgcctacgtgcctgccaaggagctgctcaagcccgaggcggacccgaggccctgcgagcgtgcgccccgcggcccagccggtcctgcagcccaacaggccgccaagctcttcggcctggagcccgggcgccccccgcccaccggccctgagcataaatggaaacccttcgagctgggcaacttcgccgccacgcagatggccgtgctggccgcgcagcaccaccacagccgcgccgaagaggaggccgccgtggtcgctgcctcctcctccaagaaggcctacctggaccctggggctgtgctgccccgctcggcggccacctgcggccggccggtcgctgacatgcactctgcggcccacgggtctggagaggcctcggccatgcagagccttataaagtacagtggcagctttgcccgggacgccgtggccgtgcgccctggtggctgtggcaagaagagcccctttggaggtttgggcaccatgaaacccgagcctgcgcccacctctgcgggtgcctcccgagcccaggcccgtctcccacactccggaggccctgcagcgggcggcggccggcagctgaagcgggaccccgagaggcccgagagcgccaaagctttcgggcgcgagggctctggtgcccagggtgaggcagaagtgcgacacccgcctgtgggcattgcagtggctgtggcccggcagaaggacagtggcggcagtggccggctggggcctgggctggtagaccaggagcgctctctgtcgctgagtaacgtcaaagggcacggccgagcagatgaggactgtgtggacgaccgggccagacaccgggaggaacggctgctcggggcacggctggaccgggatcaggagaagctgctcagagagagtaaggagctggctgacctggcccgcctgcaccctaccagctgtgctcctaacggcctgaaccccaacctcatggtgacggggggcccggcgctggcgggctcaggtcgctggtctgccgaccccgcagcccatctggccacgcacccctggttgccccgctcgggcaacgcatccatgtggctcgctggacacccctacggcttgggtcccccatctctgcaccagggcatggcccctgcgttcccacctggcctggggggctccctcccgtcagcctaccagtttgtcagggacccccaatcgggccagctggtggtcattcccagtgatcaccttcctcactttgcggagctgatggagcgggccaccgtaccgcccctctggcccgccctgtacccgccgggccgcagccccctgcaccacgcccagcagctgcagctcttctcacagcagcacttcctgcggcagcaggagttcctgtacctgcagcagcaggcggcccaggccttggaactgcagaggagcgcccagctcgtgcaggagcggttgaaggcgcaggagcaccgggcggagatggaagagaaggggagcaagcggggcctggaggctgcgggcaaggctggcctggccaccgccggccccgggctgctgccgcggaagccccctggcctggccgccggccccgcgggcacctacggcaaggccgtgagcccgccaccatcaccccgcgcatcccctgtggctgccctgaaggccaaggtcatccagaagctggaggacgtgtccaagccacccgcctacgcctaccccgccacccccagctcccaccccaccagcccgccgcccgcctccccaccgcccaccccgggtatcacccgcaaggaggaggctcccgagaatgtggtcgagaagaaagacttggagttggagaaggaagcccccagccccttccaggccctgttctcagatatcccgcccaggtacccgttccaagccctgccaccgcactacgggaggccctaccctttcctgctgcagcccacggccgccgccgacgcggacggcttggcccctgatgtgccgctcccggctgatgggcccgagcgcctggcactctcacccgaagacaagcccatccgcttgtccccctccaagatcacagagccgctgcgggagggcccggaggaagaaccgctggctgagcgggaggtgaaggcagaggtggaggacatggacgagggccccacagagctgccgcctctggagtcgccgctgccactgcccgccgcggaagccatggctacccccagccctgcagggggttgtggaggtggcctgttggaggcccaggcgctgagtgccaccgggcagagctgcgcagagccctctgagtgtccagactttgtggaggggcctgaaccacgggtggattccccgggccggacagaaccctgcaccgccgccctggacctgggggtgcagctgacacccgagacactggtggaggccaaggaggagccggtggaggtgcctgtggcggtgcccgtggtggaggcagtgcccgaggaaggcctggcgcaggtggcaccgagcgagtcccagcccaccctagaaatgtcagactgtgacgtgcccgccggggagggacagtgcccgagcctggagccccaagaggccgtgcctgtactcggcagcacctgcttcctggaagaggcaagctctgaccagttcctgcccagtctggaggacccactggctggcatgaacgccctggcggcagctgcggagctgccccaggccaggcctctgccctccccgggtgctgctggagcccaggccttggagaagctggaagcagccgagagccttgtcttggagcagagcttcctgcatggcatcaccctgctaagtgagatcgcagagctggagctggagaggaggagccaagagatgggaggtgcggagcgggccctggtggcgcggccctccctggagagtctgctggcagctggcagccacatgctgagggaggtgctggatgggcccgtggtggacccactcaagaacctgcggctcccgcgggagctgaagcccaacaagaagtacagctggatgcgcaagaaggaggagcggatgtatgccatgaagtcctccctggaggacatggacgccctggagctggacttccggatgcggctggccgaggtgcagcgccagtacaaggagaagcagcgtgagctggtgaagctgcagcgccgccgggactccgaggacaggcgcgaggaaccccatagaagcttggcacgcagaggccctggcaggccgcggaaacggacccacgccccgagcgccctgtcgcccccccgcaagagagggaagagcggccacagtagcggaaagctgagcagcaagtctctgctgacatcagatgattatgagctgggagcagggataagaaagagacacaaggggtctgaggaggaacatgatgccctcatcggaatggggaaagccagggggaggaaccagacttgggatgaacatgaggcctcgtcggacttcatcagtcagctaaagattaagaagaagaagatggccagcgaccaggagcagttggcaagcaagctcgacaaggccctctccctcaccaagcaggacaagttgaagtcgcccttcaagttttcggacagtgctggggggaaatcgaaaactagcgggggctgcggcaggtacttgactccttacgacagcctgctggggaagaacaggaaggcgctggccaagggcctcggcctgtctctgaaatcctccagagaaggtaaacacaaaagggcagccaaaaccaggaagatggaggtggggttcaaggccagaggccagcccaagtcggcccattccccgtttgcctcggaagtgagcagctactcttacaatacggactcagaggaagacgaagaattcctgaaggacgagtggcccgcccaaggcccctccagctccaaactgacgccttccctcctgtgtagcatggtggcaaagaacagcaaggcagctggtggccccaagctgaccaagaggggcctggcggccccccggactctgaaacccaagccggccaccagcaggaagcagccgttttgtctgctgcttcgagaggccgaggcgcgttcctccttcagcgactcttcggaggaatcgtttgaccaagatgagagctcggaggaggaggacgaggaggaggagctcgaggaggaggacgaggccagcggtggtggctacaggctgggtgcccgggagcgggccctgtcaccgggcctggaggagagtgggctgggcctgctggcacgcttcgccgccagcgccctccccagccccacggtgggtccatccctgtctgtggtacagctggaggccaagcagaaggcccggaagaaagaggagcggcagagcctgctgggcacagagttcgagtacaccgactcagagagcgaggtcaaggtgcgcaagcggtcgcctgcggggctgctgcggcccaagaaggggctgggggagccgggaccctccctggccgcacccacgcctggcgcccgcggtcccgaccccagcagcccagacaaggccaagctggcggtggagaaggggcgcaaggcccggaagctgcggggccccaaggagcctggcttcgaggcggggcccgaggccagcgacgacgacctgtggacgcggcgccgcagcgagcgcatcttcctgcacgacgcctcggctgctgcacctgcgcccgtcagcaccgcgcccgccaccaagaccagccgctgcgccaagggcggccccctgagcccgcgcaaggacgccgggcgtgcaaaggacaggaaggaccccaggaagaagaagaaagggaaagaggctgggccaggagctgggctgccgccgccccgagctcctgccttgccctctgaggccagggctcctcacgccagctccctgaccgctgccaaaaggagcaaagccaaggccaaagggaaggaggtgaagaaggagaaccgcggcaaggggggtgccgtgagcaagctgatggagagcatggcagccgaggaggactttgaacccaaccaagactcgagcttctctgaggacgagcacctgccgcgtggcggggctgtggagcggccgctgaccccggcccctcgctcctgcatcatcgacaaggatgagctgaaggacggcctgcgtgtgctcatccccatggatgacaagctgctgtacgccgggcacgtgcagaccgtgcactcgccagacatataccgcgtggtggtggagggtgagcggggcaaccggccccacatctactgtctggagcagttgctgcaggaggcgatcatcgatgtgaggccagcctccactcgcttcttgccacaagggaccaggattgcagcctactggagccagcagtaccgctgtctctacccaggcactgtggtccgagggttactggacctggaggacgatggggacttgatcaccgtggagtttgacgacggagacacgggcaggatccccctctcacatatccgcctcctgccccctgactataagatacagtgtgctgagccgtccccggcccttctggtgccaagtgccaagcgccgcagccggaagaccagcaaagacactggggagggcaaagatggtggcacggctgggtcggaggagccaggagccaaggcccgtgggcgtgggcggaaacccagcgccaaggccaagggtgacagagccgctaccctggaggaggggaacccaacagacgaggtccccagtacccccttagccctggagccgagcagcaccccaggttccaagaagagccccccagagcctgtggacaagcgagccaaggcccccaaggcgcgcccggcaccgccgcagcccagtcccgcaccacccgccttcaccagctgcccagcacccgagccatttgcagagctgccagctcctgccacctccctggccccagcacccctcatcaccatgcctgccacacgccccaagcccaagaaggcgcgggcagccgaggagtcgggtgccaagggccctcggaggccgggggaggaggccgagctgcttgtcaaactggaccacgagggtgtcacgtcacccaaaagcaagaaggctaaagaggccctgctgctccgggaggatccgggggcggggggctggcaggagcccaagagcctcctgagcctgggcagctatccccccgcggccggcagcagcgagcccaaggcaccctggcccaaggccaccgacggggacctcgcccaggagcccgggccggggctcacgttcgaggactctgggaaccccaagagcccagacaaggcccaggctgagcaggacggggccgaagagtccgagagcagcagcagcagcagtagtggcagcagtagcagcagcagcagcagcagcagcagcggctcggagacagaaggggaggaggaaggcgacaagaacggggacgggggctgcggcaccgggggccgtaactgcagcgctgccagctccagggcggcctcaccggcctcctcctcctcctcctcatcctcctcctcctcctcctcctcctcctcatcctcctcttcctcctcctcctcttcctcctcctcctcttcctcttcgtcttcctcctcttcctcctcctcctcttcctcgtcctcatcctcctcctcctcctcctcttcctcctcttcttcctccaccacagacgaggactcttcctgcagctcggacgatgaggcagcccccgcccccacggctggcccttccgcgcaggcggcgctccccaccaaggccaccaagcaggccggcaaggcgcggccctcggcccactccccaggcaagaagacgcccgcgccccagccccaggcgcctcctccgcagcccacacagcctctgcagcccaaggctcaggccggggccaagagccgacccaagaagagagagggcgtccacctccccaccaccaaggagctggccaagcggcagcgcctgccgtccgtggagaaccggcccaagatcgccgccttcctgccagcccggcagctctggaagtggttcggcaagcccacccagcggcgtggcatgaagggcaaggcccgcaagctcttctacaaggccatcgtgcgcggcaaggagatgatccgtatcggggactgtgccgtgttcctctctgccggccgccccaacctgccctacatcggccgcatccagagcatgtgggagtcgtggggcaacaacatggtggtccgcgtcaagtggttctaccaccccgaggagaccagcccgggcaagcagttccaccagggccagcactgggaccagaagtccagccgcagcccgacggttcctgggacacctgcttgcttggcccgtccggcggctcagggcttctctgctgcgctcccggttcgctggacgggaagaagggctgggccgtcccgtcccgtccccatcggaaccccaagtcgcgccgctgacccgtcgcagggcgagatgagcgcggacgcagcggccggggcgcccctgccccggctctgctgcctggagaagggtccgaacggctacggcttccacctgcacggggagaagggcaagttgggccagtacatccggctggtggagcccggctcgccggccgagaaggcggggctgctggcgggggaccggctggtggaggtgaacggcgaaaacgtggagaaggagacccaccagcaggtggtgagccgcatccgcgccgcactcaacgccgtgcgcctgctggtggtcgaccccgagacggacgagcagctgcagaagctcggcgtccaggtccgagaggagctgctgcgcgcccaggaagcgccggggcaggccgagccgccggccgccgccgaggtgcagggggctggcaacgaaaatgagcctcgcgaggccgacaagagccacccggagcagcgcgagcttcggcctcggctctgtaccatgaagaagggccccagtggctatggcttcaacctgcacagcgacaagtccaagccaggccagttcatccggtcagtggacccagactccccggctgaggcttcagggctccgggcccaggatcgcattgtggaggtgaacggggtctgcatggaggggaagcagcatggggacgtggtgtccgccatcagggctggcggggacgagaccaagctgctggtggtggacagggaaactgacgagttcttcaagaaatgcagagtgatcccatctcaggagcacctgaatggtcccctgcctgtgcccttcaccaatggggagatacagaaggagaacagtcgtgaagccctggcagaggcagccttggagagccccaggccagccctggtgagatccgcctccagtgacaccagcgaggagctgaattcccaagacagccccccaaaacaggactccacagcgccctcgtctacctcctcctccgaccccatcctagacttcaacatctccctggccatggccaaagagagggcccaccagaaacgcagcagcaaacgggccccgcagatggactggagcaagaaaaacgaactcttcagcaacctctgagcgccctgctgccacccagtgactggcagggccgagccagcattccaccccacctttttccttctccccaattactcccctgaatcaatgtacaaatcagcacccacatcccctttcttgacaaatgatttttctagagaactatgttcttccctgactttagggaaggtgaatgtgttcccgtcctcccgcagtcagaaaggagactctgcctccctcctcctcactgagtgcctcatcctaccgggtgtccctttgccaccctgcctgggacatcgctggaacctgcaccatgccaggatcatgggaccaggcgagagggcaccctcccttcctcccccatgtgataaatgggtccagggctgatcaaagaactctgactgcagaactgccgctctcagtggacagggcatctgttaccctgagacctgtggcagacacgtcttgttttcatttgatttttgttaagagtgcagtattgcagagtctagaggaatttttgtttccttgattaacatgattttcctggttgttacatccagggcatggcagtggcctcagccttaaacttttgttcctactcccaccctcagcgaactgggcagcacggggagggtttggctacccctgcccatccctgagccaggtaccaccattgtaaggaaacactttcagaaattcagctggttcctccaaacccttc

SEQ ID NO: 979 - DNA, 2135 bp, Homo sapiens
  misc_feature (1762)..(1762): second gene starts at position 1762
atgatgttttggaggaaactccccaaagccctcttcattgggctgactctggccattgctgtcaatctccttctggtattttctagcaaggggactttacaaaacctgtttacgggtggtctccacagggagcttcctttacatctgaataaacgctacggggcagtgataaagagactctcccacttggaggtggaattgcaggatctgaaagaaagtatgaaattagctctgaggcaacaagaaaatgtgaacagcacactgaagagggcgaaagatgaagtacgccctcttctaaaggcaatggaaaccaaggtgaatgagacaaagaagcacaaaacccaaatgaaactcttcccacactcacagcttttcaggcaatggggcgaggatctttctgaggcccagcagaaggcggcccaggacctcttccggaagtttggttacaacgcgtacctcagcaaccagctgcctctcaatcgcaccatccccgacacgcgagactacagatgtcttcggaagacatatccttcccaactcccatccctcagtgtcattctcatattcgtgaatgaagctctgtccattatacaacgggccatcaccagtatcatcaaccggacgccctctcgattgttgaaggaaatcatcttggtggatgatttcagctcaaatggagaactaaaggtacacttggatgagaagattaagctttacaaccagaagtatccaggactactgaaaataatacggcatcctgaaaggaaaggtcttgctcaagcccgcaacactggctgggaagctgccacagcagacgtggtcgccatcttggatgctcacattgaagtcaatgttgggtgggcagagccaatcttggctcggattcaggaggaccgcactgtgattgtgtctcctgtgtttgacaacattcgttttgacaccttcaaactggataagtatgaactggcagttgatgggtttaactgggaactctggtgccgctacgatgcactgccacaagcctggattgatctgcatgatgtcactgccccagtgaagagtccttcaatcatgggcatcctggctgctaacaggcacttcctgggagagatcgggtctctggatggtggaatgctcatctatggaggagagaacgtggagcttagcctgagggtgtggcagtgtggagggaaggtcgagattttgccctgttcccggattgcccacctagagagacaccacaagccctacgccttggatctcaccgctgccttgaagcgcaatgctctgcgagtggccgaaatctggatggatgagcacaaacacatggtctacttggcctggaacatacctctccagaactctggaatagattttggagacgtttcttccagaatggcactccgggaaaaactgaaatgtaaaacttttgactggtacctgaaaaatgtttatccactcttgaagccactccacaccatcgtgggctatggaagaatgaaaaacctattggatgaaaatgtctgcttggatcagggacccgttccaggcaacacccccatcatgtattactgccatgaattcagctcacagaatgtctactatcacctaactggggagctctatgtgggacaactgattgcagaggccagtgctagtgatcgctgcctgacagaccctggcaaggcggagaagcccaccttagaaccatgctccaaggcagctaagaatagactgcatatatattgggattttaaaccggaaaaatgctggcaggtggtgcaagcaaggacatctatgcatagaattctgacagcagctggaccctcaacttcttcagaagacgagaaccctgcctggcaccgctggcaggcatctggcctgacaccgctctggaggcctcccacaagcagcaaccaagccagaaaaagttgagaccagacccgttgtccctaaagatggggcccagaatgttggggtgaagctgtaggaacagggtgaaagctggtggtgtgagcaaagagaccagctatggggtggtcaggggattccgggaggtgcatgggtatgttgcagacccccccaggacaagggtggctgtggaagaatggcaaataaacacaaggcaaagtctc

SEQ ID NO: 980 - DNA, 2135 bp, Homo sapiens; identical to SEQ ID NO: 979
  misc_feature (1762)..(1762): second gene starts at position 1762

SEQ ID NO: 981 - DNA, 2135 bp, Homo sapiens; identical to SEQ ID NO: 979
  misc_feature (1762)..(1762): second gene starts at position 1762

SEQ ID NO: 982 - DNA, 2545 bp, Homo sapiens
  misc_feature (183)..(183): second gene starts at position 183
aagagtctgcgggaccggcagctgtacttcatctcccagcgggccgagcgctgaaggcagcggcgcggcgcctttgtggtagcagtggccccgcgcggaggaagttccggtgtccgcggcgctgggtcggtggcggaggctgaggagaaggaggagcgggccgtggaggcttcgccgcctagacatctgactgttggtgtgagaccagtgctcctggtggtgtgccctgagccatggaggcgcctttgcagacagagatggtggagctggtgcccaatggcaaacactcagaggggctgctcccggtcatcacccccatggcaggcaaccagagggtcgaggaccctgcacggagctgtatggagggcaagagcttcctacagaaaagtcccagcaaggagccacacttcactgacttcgaggggaagacatcattcgggatgtcagtgttcaacctcagcaatgccatcatgggcagcggcatcctgggactcgcctatgccatggccaatacgggcattatccttttcctgttcctgttgacagctgtcgccttgctctccagctactccatccacctgctactcaagtcctcaggggtcgtgggcatccgtgcctatgagcagctgggctaccgtgcctttgggaccccaggaaagctggcagcagccctggccatcacgctccagaacatcggagccatgtccagctacctgtacatcatcaagtctgagctgccacttgtcatacagaccttcctgaacctggaggagaaaacctcggactggtacatgaacgggaactacctggtaatccttgtctctgtcaccatcattctgcccctggcactgatgcggcagcttggctacctgggctactccagcggcttctctcttagctgcatggtgttcttcctaattgcagtcatctacaaaaagttccacgtgccctgcccactgccccccaacttcaacaacaccacaggcaacttcagccacgtggagatcgtgaaggagaaggtgcagctgcaggtcgagcctgaggcttcagccttctgcactcccagctacttcacgctcaactcacagacagcatacaccatccccatcatggccttcgccttcgtctgccaccccgaggtgctgcccatctatactgagctcaaggacccctccaagaagaagatgcagcacatctccaacctgtccatcgctgtcatgtacatcatgtacttcctggctgccctcttcggctacctcaccttctacaacggggtggagtcggagctgctgcacacctacagcaaggtggacccgtttgacgtcctgatcctgtgtgtgcgcgtggccgtgctgacagcagtcacgctcacagtgcccatcgttctgttcccggtgcgccgcgccatccagcagatgctgtttccaaaccaggagttcagctggctgcggcatgtgcttattgccgttggcctgctcacttgtatcaacctgctggtcatctttgcccccaacatcctgggcatctttggggtcatcggtgccacatctgccccattcctcatcttcatcttccctgccatcttctacttccgaatcatgcccacggagaaggagcctgcaagatccacccccaaaatcctggccctgtgttttgctatgcttggcttcttgctgatgaccatgagcttgagcttcatcatcattgactgggcctcagggaccagccggcatggaggaaaccactagggtgaccctcatcctgttctgtctactcaccctagcagccctgcccagactcttcagcccctgctcccatccagtggccagtcgggggaggagaaagacgcgattaacactgtggcattcagccaggccccatgtcctctctgtggaaggtttttgttcaagagccaggaccaaggcccttgggccactaccctgctaggctctggagctgtagaggcttcctgaactgggagcagggtagggctgtcgccttagatcccgcccaagcccctcattccctccttgcacagatgcatacactggggcccagcagctgcctcctgaggtgacacagcctgtaggaacatacacagctgggatcagcctgcagccatcccccgaccctgctgctaggccacggtctgcgccctggggcctcatctcccccagcccacttgttttccccccttttattccctaggcccttttcagactcctgggcccttggatactcttctcccatctcccttcacaggatgacaccctcccataccccatagctggggccagcaggttctgctgagggtggggctggtgtagggacccccaagagacccctgtcctgtcccttcaccagtcctggggaggctgggactccccctgccacaagcctgggccacagctcacattccactgctgggagaagaaacaggccgaggcccagagtggcctgcccccgggagccaaagaccccagtggccacactgggatagggtggggaggctggcagccctcttttataaatattatacataaga

SEQ ID NO: 983 - DNA, 2545 bp, Homo sapiens; identical to SEQ ID NO: 982
  misc_feature (183)..(183): second gene starts at position 183

SEQ ID NO: 984 - DNA, 17983 bp, Homo sapiens
  misc_feature (287)..(287): second gene starts at position 287
atggcagggccacgccccagcccatgggccaggctgctcctggcagccttgatcagcgtcagcctctctgggaccttggcaaaccgctgcaagaaggccccagtgaagagctgcacggagtgtgtccgtgtggataaggactgcgcctactgcacagacgagatgttcagggaccggcgctgcaacacccaggcggagctgctggccgcgggctgccagcgggagagcatcgtggtcatggagagcagcttccaaatcacagaggagacccagattgacaccaccctgcggcgcagccagatgtccccccaaggcctgcgggtccgtctgcggcccggtgaggagcggcattttgagctggaggtgtttgagccactggagagccccgtggacctgtacatcctcatggacttctccaactccatgtccgatgatctggacaacctcaagaagatggggcagaacctggctcgggtcctgagccagctcaccagcgactacactattggatttggcaagtttgtggacaaagtcagcgtcccgcagacggacatgaggcctgagaagctgaaggagccctggcccaacagtgacccccccttctccttcaagaacgtcatcagcctgacagaagatgtggatgagttccggaataaactgcagggagagcggatctcaggcaacctggatgctcctgagggcggcttcgatgccatcctgcagacagctgtgtgcacgagggacattggctggcgcccggacagcacccacctgctggtcttctccaccgagtcagccttccactatgaggctgatggcgccaacgtgctggctggcatcatgagccgcaacgatgaacggtgccacctggacaccacgggcacctacacccagtacaggacacaggactacccgtcggtgcccaccctggtgcgcctgctcgccaagcacaacatcatccccatctttgctgtcaccaactactcctatagctactacgagaagcttcacacctatttccctgtctcctcactgggggtgctgcaggaggactcgtccaacatcgtggagctgctggaggaggccttcaatcggatccgctccaacctggacatccgggccctagacagcccccgaggccttcggacagaggtcacctccaagatgttccagaagacgaggactgggtcctttcacatccggcggggggaagtgggtatataccaggtgcagctgcgggcccttgagcacgtggatgggacgcacgtgtgccagctgccggaggaccagaagggcaacatccatctgaaaccttccttctccgacggcctcaagatggacgcgggcatcatctgtgatgtgtgcacctgcgagctgcaaaaagaggtgcggtcagctcgctgcagcttcaacggagacttcgtgtgcggacagtgtgtgtgcagcgagggctggagtggccagacctgcaactgctccaccggctctctgagtgacattcagccctgcctgcgggagggcgaggacaagccgtgctccggccgtggggagtgccagtgcgggcactgtgtgtgctacggcgaaggccgctacgagggtcagttctgcgagtatgacaacttccagtgtccccgcacttccgggttcctctgcaatgaccgaggacgctgctccatgggccagtgtgtgtgtgagcctggttggacaggcccaagctgtgactgtcccctcagcaatgccacctgcatcgacagcaatgggggcatctgtaatggacgtggccactgtgagtgtggccgctgccactgccaccagcagtcgctctacacggacaccatctgcgagatcaactactcggcgatccacccgggcctctgcgaggacctacgctcctgcgtgcagtgccaggcgtggggcaccggcgagaagaaggggcgcacgtgtgaggaatgcaacttcaaggtcaagatggtggacgagcttaagagagccgaggaggtggtggtgcgctgctccttccgggacgaggatgacgactgcacctacagctacaccatggaaggtgacggcgcccctgggcccaacagcactgtcctggtgcacaagaagaaggactgccctccgggctccttctggtggctcatccccctgctcctcctcctcctgccgctcctggccctgctactgctgctatgctggaagtactgtgcctgctgcaaggcctgcctggcacttctcccgtgctgcaaccgaggtcacatggtgggctttaaggaagaccactacatgctgcgggagaacctgatggcctctgaccacttggacacgcccatgctgcgcagcgggaacctcaagggccgtgacgtggtccgctggaaggtcaccaacaacatgcagcggcctggctttgccactcatgccgccagcatcaaccccacagagctggtgccctacgggctgtccttgcgcctggcccgcctttgcaccgagaacctgctgaagcctgacactcgggagtgcgcccagctgcgccaggaggtggaggagaacctgaacgaggtctacaggcagatctccggtgtacacaagctccagcagaccaagttccggcagcagcccaatgccgggaaaaagcaagaccacaccattgtggacacagtgctgatggcgccccgctcggccaagccggccctgctgaagcttacagagaagcaggtggaacagagggccttccacgacctcaaggtggcccccggctactacaccctcactgcagaccaggacgcccggggcatggtggagttccaggagggcgtggagctggtggacgtacgggtgcccctctttatccggcctgaggatgacgacgagaagcagctgctggtggaggccatcgacgtgcccgcaggcactgccaccctcggccgccgcctggtaaacatcaccatcatcaaggagcaagccagagacgtggtgtcctttgagcagcctgagttctcggtcagccgcggggaccaggtggcccgcatccctgtcatccggcgtgtcctggacggcgggaagtcccaggtctcctaccgcacacaggatggcaccgcgcagggcaaccgggactacatccccgtggagggtgagctgctgttccagcctggggaggcctggaaagagctgcaggtgaagctcctggagctgcaagaagttgactccctcctgcggggccgccaggtccgccgtttccacgtccagctcagcaaccctaagtttggggcccacctgggccagccccactccaccaccatcatcatcagggacccagatgaactggaccggagcttcacgagtcagatgttgtcatcacagccaccccctcacggcgacctgggcgccccgcagaaccccaatgctaaggccgctgggtccaggaagatccatttcaactggctgcccccttctggcaagccaatggggtacagggtaaagtactggattcagggtgactccgaatccgaagcccacctgctcgacagcaaggtgccctcagtggagctcaccaacctgtacccgtattgcgactatgagatgaaggtgtgcgcctacggggctcagggcgagggaccctacagctccctggtgtcctgccgcacccaccaggaagtgcccagcgagccagggcgtctggccttcaatgtcgtctcctccacggtgacccagctgagctgggctgagccggctgagaccaacggtgagatcacagcctacgaggtctgctatggcctggtcaacgatgacaaccgacctattgggcccatgaagaaagtgctggttgacaaccctaagaaccggatgctgcttattgagaaccttcgggagtcccagccctaccgctacacggtgaaggcgcgcaacggggccggctgggggcctgagcgggaggccatcatcaacctggccacccagcccaagaggcccatgtccatccccatcatccctgacatccctatcgtggacgcccagagcggggaggactacgacagcttccttatgtacagcgatgacgttctacgctctccatcgggcagccagaggcccagcgtctccgatgacactggctgcggctggaagttcgagcccctgctgggggaggagctggacctgcggcgcgtcacgtggcggctgcccccggagctcatcccgcgcctgtcggccagcagcgggcgctcctccgacgccgaggcgccccacgggcccccggacgacggcggcgcgggcgggaagggcggcagcctgccccgcagtgcgacacccgggccccccggagagcacctggtgaatggccggatggactttgccttcccgggcagcaccaactccctgcacaggatgaccacgaccagtgctgctgcctatggcacccacctgagcccacacgtgccccaccgcgtgctaagcacatcctccaccctcacacgggactacaactcactgacccgctcagaacactcacactcgaccacactgcccagggactactccaccctcacctccgtctcctcccacgactctcgcctgactgctggtgtgcccgacacgcccacccgcctggtgttctctgccctggggcccacatctctcagagtgagctggcaggagccgcggtgcgagcggccgctgcagggctacagtgtggagtaccagctgctgaacggcggtgagctgcatcggctcaacatccccaaccctgcccagacctcggtggtggtggaagacctcctgcccaaccactcctacgtgttccgcgtgcgggcccagagccaggaaggctggggccgagagcgtgagggtgtcatcaccattgaatcccaggtgcacccgcagagcccactgtgtcccctgccaggctccgccttcactttgagcactcccagtgccccaggcccgctggtgttcactgccctgagcccagactcgctgcagctgagctgggagcggccacggaggcccaatggggatatcgtcggctacctggtgacctgtgagatggcccaaggaggagggccagccaccgcattccgggtggatggagacagccccgagagccggctgaccgtgccgggcctcagcgagaacgtgccctacaagttcaaggtgcaggccaggaccactgagggcttcgggccagagcgcgagggcatcatcaccatagagtcccaggatggaggacccttcccgcagctgggcagccgtgccgggctcttccagcacccgctgcaaagcgagtacagcagctggtggtgatgggcttctggtgggcagtgagaaggtgaccatgcagaacctcaatgaccgcctggcctcctacctggacaaggtgcgtgctctggaggaggccaacgccgacctggaagtgaagatccgtgactggtaccagaggcagcggcctgctgagatcaaagactacagtccctacttcaagaccattgaggacctgaggaacaagattctcacagccacagtggacaatgccaatgtccttctgcagattgacaatgcccgtctggccgcggatgacttccgcaccaagtatgagacagagttgaacctgcgcatgagtgtggaagccgacatcaatggcctgcgcagggtgctggacgaactgaccctggccagagctgacctggagatgcagattgagagcctgaaggaggagctggcctacctgaagaagaaccacgaggaggagatgaatgccctgagaggccaggtgggtggagatgtcaatgtggagatggacgctgcacctggcgtggacctgagccgcattctgaacgagatgcgtgaccagtatgagaagatggcagagaagaaccgcaaggatgccgaggaatggttcttcaccaagacagaggagctgaaccgcgaggtggccaccaacagcgagctggtgcagagcggcaagagcgagatctcggagctccggcgcaccatgcagaacctggagattgagctgcagtcccagctcagcatgaaagcatccctggagaacagcctggaggagaccaaaggtcgctactgcatgcagctggcccagatccaggagatgattggcagcgtggaggagcagctggcccagctccgctgcgagatggagcagcagaaccaggagtacaagatcctgctggacgtgaagacgcggctggagcaggagatcgccacctaccgccgcctgctggagggcgaggacgcccacctctcctcctcccagttctcctctggatcgcagtcatccagagatgtgacctcctccagccgccaaatccgcaccaaggtcatggatgtgcacgatggcaaggtggtgtccacccacgagcaggtccttcgcaccaagaactgaggctgcccagccccgctcaggcctaggaggccccccgtgtggacacagatcccactggaagatcccctctcctgcccaagcacttcacagctggaccctgcttcaccctcaccccctcctggcaatcaatacagcttcattatctgagttgcatacccgagcaccttctcttcactcagccaactgctcgctcgctcacctccctcctctgcaccatgaccacctgcagccgccagttcacctcctccagctccatgaagggctcctgcggcatcgggggcggcatcgggggcggctccagccgcatctcctccgtcctggccggagggtcctgccgcgcccccagcacctacgggggcggcctgtctgtctcatcctcccgcttctcctctgggggagcctgcgggctggggggcggctatggcggtggcttcagcagcagcagcagcagctttggtagtggctttgggggaggatatggtggtggccttggtgctggcttgggtggtggctttggtggtggctttgctggtggtgatgggcttctggtgggcagtgagaaggtgaccatgcagaacctcaatgaccgcctggcctcctacctggacaaggtgcgtgctctggaggaggccaacgccgacctggaagtgaagatccgtgactggtaccagaggcagcggcctgctgagatcaaagactacagtccctacttcaagaccattgaggacctgaggaacaagattctcacagccacagtggacaatgccaatgtccttctgcagattgacaatgcccgtctggccgcggatgacttccgcaccaagtatgagacagagttgaacctgcgcatgagtgtggaagccgacatcaatggcctgcgcagggtgctggacgaactgaccctggccagagctgacctggagatgcagattgagagcctgaaggaggagctggcctacctgaagaagaaccacgaggaggagatgaatgccctgagaggccaggtgggtggagatgtcaatgtggagatggacgctgcacctggcgtggacctgagccgcattctgaacgagatgcgtgaccagtatgagaagatggcagagaagaaccgcaaggatgccgaggaatggttcttcaccaagacagaggagctgaaccgcgaggtggccaccaacagcgagctggtgcagagcggcaagagcgagatctcggagctccggcgcaccatgcagaacctggagattgagctgcagtcccagctcagcatgaaagcatccctggagaacagcctggaggagaccaaaggtcgctactgcatgcagctggcccagatccaggagatgattggcagcgtggaggagcagctggcccagctccgctgcgagatggagcagcagaaccaggagtacaagatcctgctggacgtgaagacgcggctggagcaggagatcgccacctaccgccgcctgctggagggcgaggacgcccacctctcctcctcccagttctcctctggatcgcagtcatccagagatgtgacctcctccagccgccaaatccgcaccaaggtcatggatgtgcacgatggcaaggtggtgtccacccacgagcaggtccttcgcaccaagaactgaggctgcccagccccgctcaggcctaggaggccccccgtgtggacacagatcccactggaagatcccctctcctgcccaagcacttcacagctggaccctgcttcaccctcaccccctcctggcaatcaatacagcttcattatctgagttgcatacccgagcaccttctcttcactcagccaactgctcgctcgctcacctccctcctctgcaccatgaccacctgcagccgccagttcacctcctccagctccatgaagggctcctgcggcatcgggggcggcatcgggggcggctccagccgcatctcctccgtcctggccggagggtcctgccgcgcccccagcacctacgggggcggcctgtctgtctcatcctcccgcttctcctctgggggagcctgcgggctggggggcggctatggcggtggcttcagcagcagcagcagcagctttggtagtggctttgggggaggatatggtggtggccttggtgctggcttgggtggtggctttggtggtggctttgctggtggtgatgggcttctggtgggcagtgagaaggtgaccatgcagaacctcaatgaccgcctggcctcctacctggacaaggtgcgtgctctggaggaggccaacgccgacctggaagtgaagatccgtgactggtaccagaggcagcggcctgctgagatcaaagactacagtccctacttcaagaccattgaggacctgaggaacaagattctcacagccacagtggacaatgccaatgtccttctgcagattgacaatgcccgtctggccgcggatgacttccgcaccaagtatgagacagagttgaacctgcgcatgagtgtggaagccgacatcaatggcctgcgcagggtgctggacgaactgaccctggccagagctgacctggagatgcagattgagagcctgaaggaggagctggcctacctgaagaagaaccacgaggaggagatgaatgccctgagaggccaggtgggtggagatgtcaatgtggagatggacgctgcacctggcgtggacctgagccgcattctgaacgagatgcgtgaccagtatgagaagatggcagagaagaaccgcaaggatgccgaggaatggttcttcaccaagacagaggagctgaaccgcgaggtggccaccaacagcgagctggtgcagagcggcaagagcgagatctcggagctccggcgcaccatgcagaacctggagattgagctgcagtcccagctcagcatgaaagcatccctggagaacagcctggaggagaccaaaggtcgctactgcatgcagctggcccagatccaggagatgattggcagcgtggaggagcagctggcccagctccgctgcgagatggagcagcagaaccaggagtacaagatcctgctggacgtgaagacgcggctggagcaggagatcgccacctaccgccgcctgctggagggcgaggacgcccacctctcctcctcccagttctcctctggatcgcagtcatccagagatgtgacctcctccagccgccaaatccgcaccaaggtcatggatgtgcacgatggcaaggtggtgtccacccacgagcaggtccttcgcaccaagaactgaggctgcccagccccgctcaggcctaggaggccccccgtgtggacacagatcccactggaagatcccctctcctgcccaagcacttcacagctggaccctgcttcaccctcaccccctcctggcaatcaatacagcttcattatctgagttgcatacccgagcaccttctcttcactcagccaactgctcgctcgctcacctccctcctctgcaccatgaccacctgcagccgccagttcacctcctccagctccatgaagggctcctgcggcatcgggggcggcatcgggggcggctccagccgcatctcctccgtcctggccggagggtcctgccgcgcccccagcacctacgggggcggcctgtctgtctcatcctcccgcttctcctctgggggagcctgcgggctggggggcggctatggcggtggcttcagcagcagcagcagcagctttggtagtggctttgggggaggatatggtggtggccttggtgctggcttgggtggtggctttggtggtggctttgctggtggtgatgggcttctggtgggcagtgagaaggtgaccatgcagaacctcaatgaccgcctggcctcctacctggacaaggtgcgtgctctggaggaggccaacgccgacctggaagtgaagatccgtgactggtaccagaggcagcggcctgctgagatcaaagactacagtccctacttcaagaccattgaggacctgaggaacaagattctcacagccacagtggacaatgccaatgtccttctgcagattgacaatgcccgtctggccgcggatgacttccgcaccaagtatgagacagagttgaacctgcgcatgagtgtggaagccgacatcaatggcctgcgcagggtgctggacgaactgaccctggccagagctgacctggagatgcagattgagagcctgaaggaggagctggcctacctgaagaagaaccacgaggaggagatgaatgccctgagaggccaggtgggtggagatgtcaatgtggagatggacgctgcacctggcgtggacctgagccgcattctgaacgagatgcgtgaccagtatgagaagatggcagagaagaaccgcaaggatgccgaggaatggttcttcaccaagacagaggagctgaaccgcgaggtggccaccaacagcgagctggtgcagagcggcaagagcgagatctcggagctccggcgcaccatgcagaacctggagattgagctgcagtcccagctcagcatgaaagcatccctggagaacagcctggaggagaccaaaggtcgctactgcatgcagctggcccagatccaggagatgattggcagcgtggaggagcagctggcccagctccgctgcgagatggagcagcagaaccaggagtacaagatcctgctggacgtgaagacgcggctggagcaggagatcgccacctaccgccgcctgctggagggcgaggacgcccacctctcctcctcccagttctcctctggatcgcagtcatccagagatgtgacctcctccagccgccaaatccgcaccaaggtcatggatgtgcacgatggcaaggtggtgtccacccacgagcaggtccttcgcaccaagaactgaggctgcccagccccgctcaggcctaggaggccccccgtgtggacacagatcccactggaagatcccctctcctgcccaagcacttcacagctggaccctgcttcaccctcaccccctcctggcaatcaatacagcttcattatctgagttgcatacccgagcaccttctcttcactcagccaactgctcgctcgctcacctccctcctctgcaccatgaccacctgcagccgccagttcacctcctccagctccatgaagggctcctgcggcatcgggggcggcatcgggggcggctccagccgcatctcctccgtcctggccggagggtcctgccgcgcccccagcacctacgggggcggcctgtctgtctcatcctcccgcttctcctctgggggagcctgcgggctggggggcggctatggcggtggcttcagcagcagcagcagcagctttggtagtggctttgggggaggatatggtggtggccttggtgctggcttgggtggtggctttggtggtggctttgctggtggtgatgggcttctggtgggcagtgagaaggtgaccatgcagaacctcaatgaccgcctggcctcctacctggacaaggtgcgtgctctggaggaggccaacgccgacctggaagtgaagatccgtgactggtaccagaggcagcggcctgctgagatcaaagactacagtccctacttcaagaccattgaggacctgaggaacaagattctcacagccacagtggacaatgccaatgtccttctgcagattgacaatgcccgtctggccgcggatgacttccgcaccaagtatgagacagagttgaacctgcgcatgagtgtggaagccgacatcaatggcctgcgcagggtgctggacgaactgaccctggccagagctgacctggagatgcagattgagagcctgaaggaggagctggcctacctgaagaagaaccacgaggaggagatgaatgccctgagaggccaggtgggtggagatgtcaatgtggagatggacgctgcacctggcgtggacctgagccgcattctgaacgagatgcgtgaccagtatgagaagatggcagagaagaaccgcaaggatgccgaggaatggttcttcaccaagacagaggagctgaaccgcgaggtggccaccaacagcgagctggtgcagagcggcaagagcgagatctcggagctccggcgcaccatgcagaacctggagattgagctgcagtcccagctcagcatgaaagcatccctggagaacagcctggaggagaccaaaggtcgctactgcatgcagctggcccagatccaggagatgattggcagcgtggaggagcagctggcccagctccgctgcgagatggagcagcagaaccaggagtacaagatcctgctggacgtgaagacgcggctggagcaggagatcgccacctaccgccgcctgctggagggcgaggacgcccacctctcctcctcccagttctcctctggatcgcagtcatccagagatgtgacctcctccagccgccaaatccgcaccaaggtcatggatgtgcacgatggcaaggtggtgtccacccacgagcaggtccttcgcaccaagaactgaggctgcccagccccgctcaggcctaggaggccccccgtgtggacacagatcccactggaagatcccctctcctgcccaagcacttcacagctggaccctgcttcaccctcaccccctcctggcaatcaatacagcttcattatctgagttgcatacccgagcaccttctcttcactcagccaactgctcgctcgctcacctccctcctctgcaccatgaccacctgcagccgccagttcacctcctccagctccatgaagggctcctgcggcatcgggggcggcatcgggggcggctccagccgcatctcctccgtcctggccggagggtcctgccgcgcccccagcacctacgggggcggcctgtctgtctcatcctcccgcttctcctctgggggagcctgcgggctggggggcggctatggcggtggcttcagcagcagcagcagcagctttggtagtggctttgggggaggatatggtggtggccttggtgctggcttgggtggtggctttggtggtggctttgctggtggtgatgggcttctggtgggcagtgagaaggtgaccatgcagaacctcaatgaccgcctggcctcctacctggacaaggtgcgtgctctggaggaggccaacgccgacctggaagtgaagatccgtgactggtaccagaggcagcggcctgctgagatcaaagactacagtccctacttcaagaccattgaggacctgaggaacaagattctcacagccacagtggacaatgccaatgtccttctgcagattgacaatgcccgtctggccgcggatgacttccgcaccaagtatgagacagagttgaacctgcgcatgagtgtggaagccgacatcaatggcctgcgcagggtgctggacgaactgaccctggccagagctgacctggagatgcagattgagagcctgaaggaggagctggcctacctgaagaagaaccacgaggaggagatgaatgccctgagaggccaggtgggtggagatgtcaatgtggagatggacgctgcacctggcgtggacctgagccgcattctgaacgagatgcgtgaccagtatgagaagatggcagagaagaaccgcaaggatgccgaggaatggttcttcaccaagacagaggagctgaaccgcgaggtggccaccaacagcgagctggtgcagagcggcaagagcgagatctcggagctccggcgcaccatgcagaacctggagattgagctgcagtcccagctcagcatgaaagcatccctggagaacagcctggaggagaccaaaggtcgctactgcatgcagctggcccagatccaggagatgattggcagcgtggaggagcagctggcccagctccgctgcgagatggagcagcagaaccaggagtacaagatcctgctggacgtgaagacgcggctggagcaggagatcgccacctaccgccgcctgctggagggcgaggacgcccacctctcctcctcccagttctcctctggatcgcagtcatccagagatgtgacctcctccagccgccaaatccgcaccaaggtcatggatgtgcacgatggcaaggtggtgtccacccacgagcaggtccttcgcaccaagaactgaggctgcccagccccgctcaggcctaggaggccccccgtgtggacacagatcccactggaagatcccctctcctgcccaagcacttcacagctggaccctgcttcaccctcaccccctcctggcaatcaatacagcttcattatctgagttgcatacccgagcaccttctcttcactcagccaactgctcgctcgctcacctccctcctctgcaccatgaccacctgcagccgccagttcacctcctccagctccatgaagggctcctgcggcatcgggggcggcatcgggggcggctccagccgcatctcctccgtcctggccggagggtcctgccgcgcccccagcacctacgggggcggcctgtctgtctcatcctcccgcttctcctctgggggagcctgcgggctggggggcggctatggcggtggcttcagcagcagcagcagcagctttggtagtggctttgggggaggatatggtggtggccttggtgctggcttgggtggtggctttggtggtggctttgctggtggtgatgggcttctggtgggcagtgagaaggtgaccatgcagaacctcaatgaccgcctggcctcctacctggacaaggtgcgtgctctggaggaggccaacgccgacctggaagtgaagatccgtgactggtaccagaggcagcggcctgctgagatcaaagactacagtccctacttcaagaccattgaggacctgaggaacaagattctcacagccacagtggacaatgccaatgtccttctgcagattgacaatgcccgtctggccgcggatgacttccgcaccaagtatgagacagagttgaacctgcgcatgagtgtggaagccgacatcaatggcctgcgcagggtgctggacgaactgaccctggccagagctgacctggagatgcagattgagagcctgaaggaggagctggcctacctgaagaagaaccacgaggaggagatgaatgccctgagaggccaggtgggtggagatgtcaatgtggagatggacgctgcacctggcgtggacctgagccgcattctgaacgagatgcgtgaccagtatgagaagatggcagagaagaaccgcaaggatgccgaggaatggttcttcaccaagacagaggagctgaaccgcgaggtggccaccaacagcgagctggtgcagagcggcaagagcgagatctcggagctccggcgcaccatgcagaacctggagattgagctgcagtcccagctcagcatgaaagcatccctggagaacagcctggaggagaccaaaggtcgctactgcatgcagctggcccagatccaggagatgattggcagcgtggaggagcagctggcccagctccgctgcgagatggagcagcagaaccaggagtacaagatcctgctggacgtgaagacgcggctggagcaggagatcgccacctaccgccgcctgctggagggcgaggacgcccacctctcctcctcccagttctcctctggatcgcagtcatccagagatgtgacctcctccagccgccaaatccgcaccaaggtcatggatgtgcacgatggcaaggtggtgtccacccacgagcaggtccttcgcaccaagaactgaggctgcccagccccgctcaggcctaggaggccccccgtgtggacacagatcccactggaagatcccctctcctgcccaagcacttcacagctggaccctgcttcaccctcaccccctcctggcaatcaatacagcttcattatctgagttgcatacccgagcaccttctcttcactcagccaactgctcgctcgctcacctccctcctctgcaccatgaccacctgcagccgccagttcacctcctccagctccatgaagggctcctgcggcatcgggggcggcatcgggggcggctccagccgcatctcctccgtcctggccggagggtcctgccgcgcccccagcacctacgggggcggcctgtctgtctcatcctcccgcttctcctctgggggagcctgcgggctggggggcggctatggcggtggcttcagcagcagcagcagcagctttggtagtggctttgggggaggatatggtggtggccttggtgctggcttgggtggtggctttggtggtggctttgctggtggtgatgggcttctggtgggcagtgagaaggtgaccatgcagaacctcaatgaccgcctggcctcctacctggacaaggtgcgtgctctggaggaggccaacgccgacctggaagtgaagatccgtgactggtaccagaggcagcggcctgctgagatcaaagactacagtccctacttcaagaccattgaggacctgaggaacaagattctcacagccacagtggacaatgccaatgtccttctgcagattgacaatgcccgtctggccgcggatgacttccgcaccaagtatgagacagagttgaacctgcgcatgagtgtggaagccgacatcaatggcctgcgcagggtgctggacgaactgaccctggccagagctgacctggagatgcagattgagagcctgaaggaggagctggcctacctgaagaagaaccacgaggaggagatgaatgccctgagaggccaggtgggtggagatgtcaatgtggagatggacgctgcacctggcgtggacctgagccgcattctgaacgagatgcgtgaccagtatgagaagatggcagagaagaaccgcaaggatgccgaggaatggttcttcaccaagacagaggagctgaaccgcgaggtggccaccaacagcgagctggtgcagagcggcaagagcgagatctcggagctccggcgcaccatgcagaacctggagattgagctgcagtcccagctcagcatgaaagcatccctggagaacagcctggaggagaccaaaggtcgctactgcatgcagctggcccagatccaggagatgattggcagcgtggaggagcagctggcccagctccgctgcgagatggagcagcagaaccaggagtacaagatcctgctggacgtgaagacgcggctggagcaggagatcgccacctaccgccgcctgctggagggcgaggacgcccacctctcctcctcccagttctcctctggatcgcagtcatccagagatgtgacctcctccagccgccaaatccgcaccaaggtcatggatgtgcacgatggcaaggtggtgtccacccacgagcaggtccttcgcaccaagaactgaggctgcccagccccgctcaggcctaggaggccccccgtgtggacacagatcccactggaagatcccctctcctgcccaagcacttcacagctggaccctgcttcaccctcaccccctcctggcaatcaatacagcttcattatctgagttgcat

SEQ ID NO: 985 - DNA, 17932 bp, Homo sapiens
  misc_feature (236)..(236): second gene starts at position 236
atggcagggccacgccccagcccatgggccaggctgctcctggcagccttgatcagcgtcagcctctctgggaccttggcaaaccgctgcaagaaggccccagtgaagagctgcacggagtgtgtccgtgtggataaggactgcgcctactgcacagacgagatgttcagggaccggcgctgcaacacccaggcggagctgctggccgcgggctgccagcgggagagcatcgtggtcatggagagcagcttccaaatcacagaggagacccagattgacaccaccctgcggcgcagccagatgtccccccaaggcctgcgggtccgtctgcggcccggtgaggagcggcattttgagctggaggtgtttgagccactggagagccccgtggacctgtacatcctcatggacttctccaactccatgtccgatgatctggacaacctcaagaagatggggcagaacctggctcgggtcctgagccagctcaccagcgactacactattggatttggcaagtttgtggacaaagtcagcgtcccgcagacggacatgaggcctgagaagctgaaggagccctggcccaacagtgacccccccttctccttcaagaacgtcatcagcctgacagaagatgtggatgagttccggaataaactgcagggagagcggatctcaggcaacctggatgctcctgagggcggcttcgatgccatcctgcagacagctgtgtgcacgagggacattggctggcgcccggacagcacccacctgctggtcttctccaccgagtcagccttccactatgaggctgatggcgccaacgtgctggctggcatcatgagccgcaacgatgaacggtgccacctggacaccacgggcacctacacccagtacaggacacaggactacccgtcggtgcccaccctggtgcgcctgctcgccaagcacaacatcatccccatctttgctgtcaccaactactcctatagctactacgagaagcttcacacctatttccctgtctcctcactgggggtgctgcaggaggactcgtccaacatcgtggagctgctggaggaggccttcaatcggatccgctccaacctggacatccgggccctagacagcccccgaggccttcggacagaggtcacctccaagatgttccagaagacgaggactgggtcctttcacatccggcggggggaagtgggtatataccaggtgcagctgcgggcccttgagcacgtggatgggacgcacgtgtgccagctgccggaggaccagaagggcaacatccatctgaaaccttccttctccgacggcctcaagatggacgcgggcatcatctgtgatgtgtgcacctgcgagctgcaaaaagaggtgcggtcagctcgctgcagcttcaacggagacttcgtgtgcggacagtgtgtgtgcagcgagggctggagtggccagacctgcaactgctccaccggctctctgagtgacattcagccctgcctgcgggagggcgaggacaagccgtgctccggccgtggggagtgccagtgcgggcactgtgtgtgctacggcgaaggccgctacgagggtcagttctgcgagtatgacaacttccagtgtccccgcacttccgggttcctctgcaatgaccgaggacgctgctccatgggccagtgtgtgtgtgagcctggttggacaggcccaagctgtgactgtcccctcagcaatgccacctgcatcgacagcaatgggggcatctgtaatggacgtggccactgtgagtgtggccgctgccactgccaccagcagtcgctctacacggacaccatctgcgagatcaactactcggcgatccacccgggcctctgcgaggacctacgctcctgcgtgcagtgccaggcgtggggcaccggcgagaagaaggggcgcacgtgtgaggaatgcaacttcaaggtcaagatggtggacgagcttaagagagccgaggaggtggtggtgcgctgctccttccgggacgaggatgacgactgcacctacagctacaccatggaaggtgacggcgcccctgggcccaacagcactgtcctggtgcacaagaagaaggactgccctccgggctccttctggtggctcatccccctgctcctcctcctcctgccgctcctggccctgctactgctgctatgctggaagtactgtgcctgctgcaaggcctgcctggcacttctcccgtgctgcaaccgaggtcacatggtgggctttaaggaagaccactacatgctgcgggagaacctgatggcctctgaccacttggacacgcccatgctgcgcagcgggaacctcaagggccgtgacgtggtccgctggaaggtcaccaacaacatgcagcggcctggctttgccactcatgccgccagcatcaaccccacagagctggtgccctacgggctgtccttgcgcctggcccgcctttgcaccgagaacctgctgaagcctgacactcgggagtgcgcccagctgcgccaggaggtggaggagaacctgaacgaggtctacaggcagatctccggtgtacacaagctccagcagaccaagttccggcagcagcccaatgccgggaaaaagcaagaccacaccattgtggacacagtgctgatggcgccccgctcggccaagccggccctgctgaagcttacagagaagcaggtggaacagagggccttccacgacctcaaggtggcccccggctactacaccctcactgcagaccaggacgcccggggcatggtggagttccaggagggcgtggagctggtggacgtacgggtgcccctctttatccggcctgaggatgacgacgagaagcagctgctggtggaggccatcgacgtgcccgcaggcactgccaccctcggccgccgcctggtaaacatcaccatcatcaaggagcaagccagagacgtggtgtcctttgagcagcctgagttctcggtcagccgcggggaccaggtggcccgcatccctgtcatccggcgtgtcctggacggcgggaagtcccaggtctcctaccgcacacaggatggcaccgcgcagggcaaccgggactacatccccgtggagggtgagctgctgttccagcctggggaggcctggaaagagctgcaggtgaagctcctggagctgcaagaagttgactccctcctgcggggccgccaggtccgccgtttccacgtccagctcagcaaccctaagtttggggcccacctgggccagccccactccaccaccatcatcatcagggacccagatgaactggaccggagcttcacgagtcagatgttgtcatcacagccaccccctcacggcgacctgggcgccccgcagaaccccaatgctaaggccgctgggtccaggaagatccatttcaactggctgcccccttctggcaagccaatggggtacagggtaaagtactggattcagggtgactccgaatccgaagcccacctgctcgacagcaaggtgccctcagtggagctcaccaacctgtacccgtattgcgactatgagatgaaggtgtgcgcctacggggctcagggcgagggaccctacagctccctggtgtcctgccgcacccaccaggaagtgcccagcgagccagggcgtctggccttcaatgtcgtctcctccacggtgacccagctgagctgggctgagccggctgagaccaacggtgagatcacagcctacgaggtctgctatggcctggtcaacgatgacaaccgacctattgggcccatgaagaaagtgctggttgacaaccctaagaaccggatgctgcttattgagaaccttcgggagtcccagccctaccgctacacggtgaaggcgcgcaacggggccggctgggggcctgagcgggaggccatcatcaacctggccacccagcccaagaggcccatgtccatccccatcatccctgacatccctatcgtggacgcccagagcggggaggactacgacagcttccttatgtacagcgatgacgttctacgctctccatcgggcagccagaggcccagcgtctccgatgacactgagcacctggtgaatggccggatggactttgccttcccgggcagcaccaactccctgcacaggatgaccacgaccagtgctgctgcctatggcacccacctgagcccacacgtgccccaccgcgtgctaagcacatcctccaccctcacacgggactacaactcactgacccgctcagaacactcacactcgaccacactgcccagggactactccaccctcacctccgtctcctcccacggcctccctcccatctgggaacacgggaggagcaggcttccgctgtcctgggccctggggtcccggagtcgggctcagatgaaagggttccccccttccaggggcccacgagactctataatcctggctgggaggccagcagcgccctcctggggcccagactctcgcctgactgctggtgtgcccgacacgcccacccgcctggtgttctctgccctggggcccacatctctcagagtgagctggcaggagccgcggtgcgagcggccgctgcagggctacagtgtggagtaccagctgctgaacggcggtgagctgcatcggctcaacatccccaaccctgcccagacctcggtggtggtggaagacctcctgcccaaccactcctacgtgttccgcgtgcgggcccagagccaggaaggctggggccgagagcgtgagggtgtcatcaccattgaatcccaggtgcacccgcagagcccactgtgtcccctgccaggctccgccttcactttgagcactcccagtgccccaggcccgctggtgttcactgccctgagcccagactcgctgcagctgagctgggagcggccacggaggcccaatggggatatcgtcggctacctggtgacctgtgagatggcccaaggaggagggccagccaccgcattccgggtggatggagacagccccgagagccggctgaccgtgccgggcctcagcgagaacgtgccctacaagttcaaggtgcaggccaggaccactgagggcttcgggccagagcgcgagggcatcatcaccatagagtcccaggatggaggacccttcccgcagctgggcagccgtgccgggctcttccagcacccgctgcaaagcgagtacagcagctggtggtgatgggcttctggtgggcagtgagaaggtgaccatgcagaacctcaatgaccgcctggcctcctacctggacaaggtgcgtgctctggaggaggccaacgccgacctggaagtgaagatccgtgactggtaccagaggcagcggcctgctgagatcaaagactacagtccctacttcaagaccattgaggacctgaggaacaagattctcacagccacagtggacaatgccaatgtccttctgcagattgacaatgcccgtctggccgcggatgacttccgcaccaagtatgagacagagttgaacctgcgcatgagtgtggaagccgacatcaatggcctgcgcagggtgctggacgaactgaccctggccagagctgacctggagatgcagattgagagcctgaaggaggagctggcctacctgaagaagaaccacgaggaggagatgaatgccctgagaggccaggtgggtggagatgtcaatgtggagatggacgctgcacctggcgtggacctgagccgcattctgaacgagatgcgtgaccagtatgagaagatggcagagaagaaccgcaaggatgccgaggaatggttcttcaccaagacagaggagctgaaccgcgaggtggccaccaacagcgagctggtgcagagcggcaagagcgagatctcggagctccggcgcaccatgcagaacctggagattgagctgcagtcccagctcagcatgaaagcatccctggagaacagcctggaggagaccaaaggtcgctactgcatgcagctggcccagatccaggagatgattggcagcgtggaggagcagctggcccagctccgctgcgagatggagcagcagaaccaggagtacaagatcctgctggacgtgaagacgcggctggagcaggagatcgccacctaccgccgcctgctggagggcgaggacgcccacctctcctcctcccagttctcctctggatcgcagtcatccagagatgtgacctcctccagccgccaaatccgcaccaaggtcatggatgtgcacgatggcaaggtggtgtccacccacgagcaggtccttcgcaccaagaactgaggctgcccagccccgctcaggcctaggaggccccccgtgtggacacagatcccactggaagatcccctctcctgcccaagcacttcacagctggaccctgcttcaccctcaccccctcctggcaatcaatacagcttcattatctgagttgcatacccgagcaccttctcttcactcagccaactgctcgctcgctcacctccctcctctgcaccatgaccacctgcagccgccagttcacctcctccagctccatgaagggctcctgcggcatcgggggcggcatcgggggcggctccagccgcatctcctccgtcctggccggagggtcctgccgcgcccccagcacctacgggggcggcctgtctgtctcatcctcccgcttctcctctgggggagcctgcgggctggggggcggctatggcggtggcttcagcagcagcagcagcagctttggtagtggctttgggggaggatatggtggtggccttggtgctggcttgggtggtggctttggtggtggctttgctggtggtgatgggcttctggtgggcagtgagaaggtgaccatgcagaacctcaatgaccgcctggcctcctacctggacaaggtgcgtgctctggaggaggccaacgccgacctggaagtgaagatccgtgactggtaccagaggcagcggcctgctgagatcaaagactacagtccctacttcaagaccattgaggacctgaggaacaagattctcacagccacagtggacaatgccaatgtccttctgcagattgacaatgcccgtctggccgcggatgacttccgcaccaagtatgagacagagttgaacctgcgcatgagtgtggaagccgacatcaatggcctgcgcagggtgctggacgaactgaccctggccagagctgacctggagatgcagattgagagcctgaaggaggagctggcctacctgaagaagaaccacgaggaggagatgaatgccctgagaggccaggtgggtggagatgtcaatgtggagatggacgctgcacctggcgtggacctgagccgcattctgaacgagatgcgtgaccagtatgagaagatggcagagaagaaccgcaaggatgccgaggaatggttcttcaccaagacagaggagctgaaccgcgaggtggccaccaacagcgagctggtgcagagcggcaagagcgagatctcggagctccggcgcaccatgcagaacctggagattgagctgcagtcccagctcagcatgaaagcatccctggagaacagcctggaggagaccaaaggtcgctactgcatgcagctggcccagatccaggagatgattggcagcgtggaggagcagctggcccagctccgctgcgagatggagcagcagaaccaggagtacaagatcctgctggacgtgaagacgcggctggagcaggagatcgccacctaccgccgcctgctggagggcgaggacgcccacctctcctcctcccagttctcctctggatcgcagtcatccagagatgtgacctcctccagccgccaaatccgcaccaaggtcatggatgtgcacgatggcaaggtggtgtccacccacgagcaggtccttcgcaccaagaactgaggctgcccagccccgctcaggcctaggaggccccccgtgtggacacagatcccactggaagatcccctctcctgcccaagcacttcacagctggaccctgcttcaccctcaccccctcctggcaatcaatacagcttcattatctgagttgcatacccgagcaccttctcttcactcagccaactgctcgctcgctcacctccctcctctgcaccatgaccacctgcagccgccagttcacctcctccagctccatgaagggctcctgcggcatcgggggcggcatcgggggcggctccagccgcatctcctccgtcctggccggagggtcctgccgcgcccccagcacctacgggggcggcctgtctgtctcatcctcccgcttctcctctgggggagcctgcgggctggggggcggctatggcggtggcttcagcagcagcagcagcagctttggtagtggctttgggggaggatatggtggtggccttggtgctggcttgggtggtggctttggtggtggctttgctggtggtgatgggcttctggtgggcagtgagaaggtgaccatgcagaacctcaatgaccgcctggcctcctacctggacaaggtgcgtgctctggaggaggccaacgccgacctggaagtgaagatccgtgactggtaccagaggcagcggcctgctgagatcaaagactacagtccctacttcaagaccattgaggacctgaggaacaagattctcacagccacagtggacaatgccaatgtccttctgcagattgacaatgcccgtctggccgcggatgacttccgcaccaagtatgagacagagttgaacctgcgcatgagtgtggaagccgacatcaatggcctgcgcagggtgctggacgaactgaccctggccagagctgacctggagatgcagattgagagcctgaaggaggagctggcctacctgaagaagaaccacgaggaggagatgaatgccctgagaggccaggtgggtggagatgtcaatgtggagatggacgctgcacctggcgtggacctgagccgcattctgaacgagatgcgtgaccagtatgagaagatggcagagaagaaccgcaaggatgccgaggaatggttcttcaccaagacagaggagctgaaccgcgaggtggccaccaacagcgagctggtgcagagcggcaagagcgagatctcggagctccggcgcaccatgcagaacctggagattgagctgcagtcccagctcagcatgaaagcatccctggagaacagcctggaggagaccaaaggtcgctactgcatgcagctggcccagatccaggagatgattggcagcgtggaggagcagctggcccagctccgctgcgagatggagcagcagaaccaggagtacaagatcctgctggacgtgaagacgcggctggagcaggagatcgccacctaccgccgcctgctggagggcgaggacgcccacctctcctcctcccagttctcctctggatcgcagtcatccagagatgtgacctcctccagccgccaaatccgcaccaaggtcatggatgtgcacgatggcaaggtggtgtccacccacgagcaggtccttcgcaccaagaactgaggctgcccagccccgctcaggcctaggaggccccccgtgtggacacagatcccactggaagatcccctctcctgcccaagcacttcacagctggaccctgcttcaccctcaccccctcctggcaatcaatacagcttcattatctgagttgcatacccgagcaccttctcttcactcagccaactgctcgctcgctcacctccctcctctgcaccatgaccacctgcagccgccagttcacctcctccagctccatgaagggctcctgcggcatcgggggcggcatcgggggcggctccagccgcatctcctccgtcctggccggagggtcctgccgcgcccccagcacctacgggggcggcctgtctgtctcatcctcccgcttctcctctgggggagcctgcgggctggggggcggctatggcggtggcttcagcagcagcagcagcagctttggtagtggctttgggggaggatatggtggtggccttggtgctggcttgggtggtggctttggtggtggctttgctggtggtgatgggcttctggtgggcagtgagaaggtgaccatgcagaacctcaatgaccgcctggcctcctacctggacaaggtgcgtgctctggaggaggccaacgccgacctggaagtgaagatccgtgactggtaccagaggcagcggcctgctgagatcaaagactacagtccctacttcaagaccattgaggacctgaggaacaagattctcacagccacagtggacaatgccaatgtccttctgcagattgacaatgcccgtctggccgcggatgacttccgcaccaagtatgagacagagttgaacctgcgcatgagtgtggaagccgacatcaatggcctgcgcagggtgctggacgaactgaccctggccagagctgacctggagatgcagattgagagcctgaaggaggagctggcctacctgaagaagaaccacgaggaggagatgaatgccctgagaggccaggtgggtggagatgtcaatgtggagatggacgctgcacctggcgtggacctgagccgcattctgaacgagatgcgtgaccagtatgagaagatggcagagaagaaccgcaaggatgccgaggaatggttcttcaccaagacagaggagctgaaccgcgaggtggccaccaacagcgagctggtgcagagcggcaagagcgagatctcggagctccggcgcaccatgcagaacctggagattgagctgcagtcccagctcagcatgaaagcatccctggagaacagcctggaggagaccaaaggtcgctactgcatgcagctggcccagatccaggagatgattggcagcgtggaggagcagctggcccagctccgctgcgagatggagcagcagaaccaggagtacaagatcctgctggacgtgaagacgcggctggagcaggagatcgccacctaccgccgcctgctggagggcgaggacgcccacctctcctcctcccagttctcctctggatcgcagtcatccagagatgtgacctcctccagccgccaaatccgcaccaaggtcatggatgtgcacgatggcaaggtggtgtccacccacgagcaggtccttcgcaccaagaactgaggctgcccagccccgctcaggcctaggaggccccccgtgtggacacagatcccactggaagatcccctctcctgcccaagcacttcacagctggaccctgcttcaccctcaccccctcctggcaatcaatacagcttcattatctgagttgcatacccgagcaccttctcttcactcagccaactgctcgctcgctcacctccctcctctgcaccatgaccacctgcagccgccagttcacctcctccagctccatgaagggctcctgcggcatcgggggcggcatcgggggcggctccagccgcatctcctccgtcctggccggagggtcctgccgcgcccccagcacctacgggggcggcctgtctgtctcatcctcccgcttctcctctgggggagcctgcgggctggggggcggctatggcggtggcttcagcagcagcagcagcagctttggtagtggctttgggggaggatatggtggtggccttggtgctggcttgggtggtggctttggtggtggctttgctggtggtgatgggcttctggtgggcagtgagaaggtgaccatgcagaacctcaatgaccgcctggcctcctacctggacaaggtgcgtgctctggaggaggccaacgccgacctggaagtgaagatccgtgactggtaccagaggcagcggcctgctgagatcaaagactacagtccctacttcaagaccattgaggacctgaggaacaagattctcacagccacagtggacaatgccaatgtccttctgcagattgacaatgcccgtctggccgcggatgacttccgcaccaagtatgagacagagttgaacctgcgcatgagtgtggaagccgacatcaatggcctgcgcagggtgctggacgaactgaccctggccagagctgacctggagatgcagattgagagcctgaaggaggagctggcctacctgaagaagaaccacgaggaggagatgaatgccctgagaggccaggtgggtggagatgtcaatgtggagatggacgctgcacctggcgtggacctgagccgcattctgaacgagatgcgtgaccagtatgagaagatggcagagaagaaccgcaaggatgccgaggaatggttcttcaccaagacagaggagctgaaccgcgaggtggccaccaacagcgagctggtgcagagcggcaagagcgagatctcggagctccggcgcaccatgcagaacctggagattgagctgcagtcccagctcagcatgaaagcatccctggagaacagcctggaggagaccaaaggtcgctactgcatgcagctggcccagatccaggagatgattggcagcgtggaggagcagctggcccagctccgctgcgagatggagcagcagaaccaggagtacaagatcctgctggacgtgaagacgcggctggagcaggagatcgccacctaccgccgcctgctggagggcgaggacgcccacctctcctcctcccagttctcctctggatcgcagtcatccagagatgtgacctcctccagccgccaaatccgcaccaaggtcatggatgtgcacgatggcaaggtggtgtccacccacgagcaggtccttcgcaccaagaactgaggctgcccagccccgctcaggcctaggaggccccccgtgtggacacagatcccactggaagatcccctctcctgcccaagcacttcacagctggaccctgcttcaccctcaccccctcctggcaatcaatacagcttcattatctgagttgcatacccgagcaccttctcttcactcagccaactgctcgctcgctcacctccctcctctgcaccatgaccacctgcagccgccagttcacctcctccagctccatgaagggctcctgcggcatcgggggcggcatcgggggcggctccagccgcatctcctccgtcctggccggagggtcctgccgcgcccccagcacctacgggggcggcctgtctgtctcatcctcccgcttctcctctgggggagcctgcgggctggggggcggctatggcggtggcttcagcagcagcagcagcagctttggtagtggctttgggggaggatatggtggtggccttggtgctggcttgggtggtggctttggtggtggctttgctggtggtgatgggcttctggtgggcagtgagaaggtgaccatgcagaacctcaatgaccgcctggcctcctacctggacaaggtgcgtgctctggaggaggccaacgccgacctggaagtgaagatccgtgactggtaccagaggcagcggcctgctgagatcaaagactacagtccctacttcaagaccattgaggacctgaggaacaagattctcacagccacagtggacaatgccaatgtccttctgcagattgacaatgcccgtctggccgcggatgacttccgcaccaagtatgagacagagttgaacctgcgcatgagtgtggaagccgacatcaatggcctgcgcagggtgctggacgaactgaccctggccagagctgacctggagatgcagattgagagcctgaaggaggagctggcctacctgaagaagaaccacgaggaggagatgaatgccctgagaggccaggtgggtggagatgtcaatgtggagatggacgctgcacctggcgtggacctgagccgcattctgaacgagatgcgtgaccagtatgagaagatggcagagaagaaccgcaaggatgccgaggaatggttcttcaccaagacagaggagctgaaccgcgaggtggccaccaacagcgagctggtgcagagcggcaagagcgagatctcggagctccggcgcaccatgcagaacctggagattgagctgcagtcccagctcagcatgaaagcatccctggagaacagcctggaggagaccaaaggtcgctactgcatgcagctggcccagatccaggagatgattggcagcgtggaggagcagctggcccagctccgctgcgagatggagcagcagaaccaggagtacaagatcctgctggacgtgaagacgcggctggagcaggagatcgccacctaccgccgcctgctggagggcgaggacgcccacctctcctcctcccagttctcctctggatcgcagtcatccagagatgtgacctcctccagccgccaaatccgcaccaaggtcatggatgtgcacgatggcaaggtggtgtccacccacgagcaggtccttcgcaccaagaactgaggctgcccagccccgctcaggcctaggaggccccccgtgtggacacagatcccactggaagatcccctctcctgcccaagcacttcacagctggaccctgcttcaccctcaccccctcctggcaatcaatacagcttcattatctgagttgcatacccgagcaccttctcttcactcagccaactgctcgctcgctcacctccctcctctgcaccatgaccacctgcagccgccagttcacctcctccagctccatgaagggctcctgcggcatcgggggcggcatcgggggcggctccagccgcatctcctccgtcctggccggagggtcctgccgcgcccccagcacctacgggggcggcctgtctgtctcatcctcccgcttctcctctgggggagcctgcgggctggggggcggctatggcggtggcttcagcagcagcagcagcagctttggtagtggctttgggggaggatatggtggtggccttggtgctggcttgggtggtggctttggtggtggctttgctggtggtgatgggcttctggtgggcagtgagaaggtgaccatgcagaacctcaatgaccgcctggcctcctacctggacaaggtgcgtgctctggaggaggccaacgccgacctggaagtgaagatccgtgactggtaccagaggcagcggcctgctgagatcaaagactacagtccctacttcaagaccattgaggacctgaggaacaagattctcacagccacagtggacaatgccaatgtccttctgcagattgacaatgcccgtctggccgcggatgacttccgcaccaagtatgagacagagttgaacctgcgcatgagtgtggaagccgacatcaatggcctgcgcagggtgctggacgaactgaccctggccagagctgacctggagatgcagattgagagcctgaaggaggagctggcctacctgaagaagaaccacgaggaggagatgaatgccctgagaggccaggtgggtggagatgtcaatgtggagatggacgctgcacctggcgtggacctgagccgcattctgaacgagatgcgtgaccagtatgagaagatggcagagaagaaccgcaaggatgccgaggaatggttcttcaccaagacagaggagctgaaccgcgaggtggccaccaacagcgagctggtgcagagcggcaagagcgagatctcggagctccggcgcaccatgcagaacctggagattgagctgcagtcccagctcagcatgaaagcatccctggagaacagcctggaggagaccaaaggtcgctactgcatgcagctggcccagatccaggagatgattggcagcgtggaggagcagctggcccagctccgctgcgagatggagcagcagaaccaggagtacaagatcctgctggacgtgaagacgcggctggagcaggagatcgccacctaccgccgcctgctggagggcgaggacgcccacctctcctcctcccagttctcctctggatcgcagtcatccagagatgtgacctcctccagccgccaaatccgcaccaaggtcatggatgtgcacgatggcaaggtggtgtccacccacgagcaggtccttcgcaccaagaactgaggctgcccagccccgctcaggcctaggaggccccccgtgtggacacagatcccactggaagatcccctctcctgcccaagcacttcacagctggaccctgcttcaccctcaccccctcctggcaatcaatacagcttcattatctgagttgcatacccgagcaccttctcttcactcagccaactgctcgctcgctcacctccctcctctgcaccatgaccacctgcagccgccagttcacctcctccagctccatgaagggctcctgcggcatcgggggcggcatcgggggcggctccagccgcatctcctccgtcctggccggagggtcctgccgcgcccccagcacctacgggggcggcctgtctgtctcatcctcccgcttctcctctgggggagcctgcgggctggggggcggctatggcggtggcttcagcagcagcagcagcagctttggtagtggctttgggggaggatatggtggtggccttggtgctggcttgggtggtggctttggtggtggctttgctggtggtgatgggcttctggtgggcagtgagaaggtgaccatgcagaacctcaatgaccgcctggcctcctacctggacaaggtgcgtgctctggaggaggccaacgccgacctggaagtgaagatccgtgactggtaccagaggcagcggcctgctgagatcaaagactacagtccctacttcaagaccattgaggacctgaggaacaagattctcacagccacagtggacaatgccaatgtccttctgcagattgacaatgcccgtctggccgcggatgacttccgcaccaagtatgagacagagttgaacctgcgcatgagtgtggaagccgacatcaatggcctgcgcagggtgctggacgaactgaccctggccagagctgacctggagatgcagattgagagcctgaaggaggagctggcctacctgaagaagaaccacgaggaggagatgaatgccctgagaggccaggtgggtggagatgtcaatgtggagatggacgctgcacctggcgtggacctgagccgcattctgaacgagatgcgtgaccagtatgagaagatggcagagaagaaccgcaaggatgccgaggaatggttcttcaccaagacagaggagctgaaccgcgaggtggccaccaacagcgagctggtgcagagcggcaagagcgagatctcggagctccggcgcaccatgcagaacctggagattgagctgcagtcccagctcagcatgaaagcatccctggagaacagcctggaggagaccaaaggtcgctactgcatgcagctggcccagatccaggagatgattggcagcgtggaggagcagctggcccagctccgctgcgagatggagcagcagaaccaggagtacaagatcctgctggacgtgaagacgcggctggagcaggagatcgccacctaccgccgcctgctggagggcgaggacgcccacctctcctcctcccagttctcctctggatcgcagtcatccagagatgtgacctcctccagccgccaaatccgcaccaaggtcatggatgtgcacgatggcaaggtggtgtccacccacgagcaggtccttcgcaccaagaactgaggctgcccagccccgctcaggcctaggaggccccccgtgtggacacagatcccactggaagatcccctctcctgcccaagcacttcacagctggaccctgcttcaccctcaccccctcctggcaatcaatacagcttcattatctgagttgcat

SEQ ID NO: 986 - DNA, 17773 bp, Homo sapiens
  misc_feature (77)..(77): second gene starts at position 77
atggcagggccacgccccagcccatgggccaggctgctcctggcagccttgatcagcgtcagcctctctgggaccttggcaaaccgctgcaagaaggccccagtgaagagctgcacggagtgtgtccgtgtggataaggactgcgcctactgcacagacgagatgttcagggaccggcgctgcaacacccaggcggagctgctggccgcgggctgccagcgggagagcatcgtggtcatggagagcagcttccaaatcacagaggagacccagattgacaccaccctgcggcgcagccagatgtccccccaaggcctgcgggtccgtctgcggcccggtgaggagcggcattttgagctggaggtgtttgagccactggagagccccgtggacctgtacatcctcatggacttctccaactccatgtccgatgatctggacaacctcaagaagatggggcagaacctggctcgggtcctgagccagctcaccagcgactacactattggatttggcaagtttgtggacaaagtcagcgtcccgcagacggacatgaggcctgagaagctgaaggagccctggcccaacagtgacccccccttctccttcaagaacgtcatcagcctgacagaagatgtggatgagttccggaataaactgcagggagagcggatctcaggcaacctggatgctcctgagggcggcttcgatgccatcctgcagacagctgtgtgcacgagggacattggctggcgcccggacagcacccacctgctggtcttctccaccgagtcagccttccactatgaggctgatggcgccaacgtgctggctggcatcatgagccgcaacgatgaacggtgccacctggacaccacgggcacctacacccagtacaggacacaggactacccgtcggtgcccaccctggtgcgcctgctcgccaagcacaacatcatccccatctttgctgtcaccaactactcctatagctactacgagaagcttcacacctatttccctgtctcctcactgggggtgctgcaggaggactcgtccaacatcgtggagctgctggaggaggccttcaatcggatccgctccaacctggacatccgggccctagacagcccccgaggccttcggacagaggtcacctccaagatgttccagaagacgaggactgggtcctttcacatccggcggggggaagtgggtatataccaggtgcagctgcgggcccttgagcacgtggatgggacgcacgtgtgccagctgccggaggaccagaagggcaacatccatctgaaaccttccttctccgacggcctcaagatggacgcgggcatcatctgtgatgtgtgcacctgcgagctgcaaaaagaggtgcggtcagctcgctgcagcttcaacggagacttcgtgtgcggacagtgtgtgtgcagcgagggctggagtggccagacctgcaactgctccaccggctctctgagtgacattcagccctgcctgcgggagggcgaggacaagccgtgctccggccgtggggagtgccagtgcgggcactgtgtgtgctacggcgaaggccgctacgagggtcagttctgcgagtatgacaacttccagtgtccccgcacttccgggttcctctgcaatgaccgaggacgctgctccatgggccagtgtgtgtgtgagcctggttggacaggcccaagctgtgactgtcccctcagcaatgccacctgcatcgacagcaatgggggcatctgtaatggacgtggccactgtgagtgtggccgctgccactgccaccagcagtcgctctacacggacaccatctgcgagatcaactactcggcgatccacccgggcctctgcgaggacctacgctcctgcgtgcagtgccaggcgtggggcaccggcgagaagaaggggcgcacgtgtgaggaatgcaacttcaaggtcaagatggtggacgagcttaagagagccgaggaggtggtggtgcgctgctccttccgggacgaggatgacgactgcacctacagctacaccatggaaggtgacggcgcccctgggcccaacagcactgtcctggtgcacaagaagaaggactgccctccgggctccttctggtggctcatccccctgctcctcctcctcctgccgctcctggccctgctactgctgctatgctggaagtactgtgcctgctgcaaggcctgcctggcacttctcccgtgctgcaaccgaggtcacatggtgggctttaaggaagaccactacatgctgcgggagaacctgatggcctctgaccacttggacacgcccatgctgcgcagcgggaacctcaagggccgtgacgtggtccgctggaaggtcaccaacaacatgcagcggcctggctttgccactcatgccgccagcatcaaccccacagagctggtgccctacgggctgtccttgcgcctggcccgcctttgcaccgagaacctgctgaagcctgacactcgggagtgcgcccagctgcgccaggaggtggaggagaacctgaacgaggtctacaggcagatctccggtgtacacaagctccagcagaccaagttccggcagcagcccaatgccgggaaaaagcaagaccacaccattgtggacacagtgctgatggcgccccgctcggccaagccggccctgctgaagcttacagagaagcaggtggaacagagggccttccacgacctcaaggtggcccccggctactacaccctcactgcagaccaggacgcccggggcatggtggagttccaggagggcgtggagctggtggacgtacgggtgcccctctttatccggcctgaggatgacgacgagaagcagctgctggtggaggccatcgacgtgcccgcaggcactgccaccctcggccgccgcctggtaaacatcaccatcatcaaggagcaagccagagacgtggtgtcctttgagcagcctgagttctcggtcagccgcggggaccaggtggcccgcatccctgtcatccggcgtgtcctggacggcgggaagtcccaggtctcctaccgcacacaggatggcaccgcgcagggcaaccgggactacatccccgtggagggtgagctgctgttccagcctggggaggcctggaaagagctgcaggtgaagctcctggagctgcaagaagttgactccctcctgcggggccgccaggtccgccgtttccacgtccagctcagcaaccctaagtttggggcccacctgggccagccccactccaccaccatcatcatcagggacccagatgaactggaccggagcttcacgagtcagatgttgtcatcacagccaccccctcacggcgacctgggcgccccgcagaaccccaatgctaaggccgctgggtccaggaagatccatttcaactggctgcccccttctggcaagccaatggggtacagggtaaagtactggattcagggtgactccgaatccgaagcccacctgctcgacagcaaggtgccctcagtggagctcaccaacctgtacccgtattgcgactatgagatgaaggtgtgcgcctacggggctcagggcgagggaccctacagctccctggtgtcctgccgcacccaccaggaagtgcccagcgagccagggcgtctggccttcaatgtcgtctcctccacggtgacccagctgagctgggctgagccggctgagaccaacggtgagatcacagcctacgaggtctgctatggcctggtcaacgatgacaaccgacctattgggcccatgaagaaagtgctggttgacaaccctaagaaccggatgctgcttattgagaaccttcgggagtcccagccctaccgctacacggtgaaggcgcgcaacggggccggctgggggcctgagcgggaggccatcatcaacctggccacccagcccaagaggcccatgtccatccccatcatccctgacatccctatcgtggacgcccagagcggggaggactacgacagcttccttatgtacagcgatgacgttctacgctctccatcgggcagccagaggcccagcgtctccgatgacactgagcacctggtgaatggccggatggactttgccttcccgggcagcaccaactccctgcacaggatgaccacgaccagtgctgctgcctatggcacccacctgagcccacacgtgccccaccgcgtgctaagcacatcctccaccctcacacgggactacaactcactgacccgctcagaacactcacactcgaccacactgcccagggactactccaccctcacctccgtctcctcccacgactctcgcctgactgctggtgtgcccgacacgcccacccgcctggtgttctctgccctggggcccacatctctcagagtgagctggcaggagccgcggtgcgagcggccgctgcagggctacagtgtggagtaccagctgctgaacggcggtgagctgcatcggctcaacatccccaaccctgcccagacctcggtggtggtggaagacctcctgcccaaccactcctacgtgttccgcgtgcgggcccagagccaggaaggctggggccgagagcgtgagggtgtcatcaccattgaatcccaggtgcacccgcagagcccactgtgtcccctgccaggctccgccttcactttgagcactcccagtgccccaggcccgctggtgttcactgccctgagcccagactcgctgcagctgagctgggagcggccacggaggcccaatggggatatcgtcggctacctggtgacctgtgagatggcccaaggaggagggccagccaccgcattccgggtggatggagacagccccgagagccggctgaccgtgccgggcctcagcgagaacgtgccctacaagttcaaggtgcaggccaggaccactgagggcttcgggccagagcgcgagggcatcatcaccatagagtcccaggatggaggacccttcccgcagctgggcagccgtgccgggctcttccagcacccgctgcaaagcgagtacagcagctggtggtgatgggcttctggtgggcagtgagaaggtgaccatgcagaacctcaatgaccgcctggcctcctacctggacaaggtgcgtgctctggaggaggccaacgccgacctggaagtgaagatccgtgactggtaccagaggcagcggcctgctgagatcaaagactacagtccctacttcaagaccattgaggacctgaggaacaagattctcacagccacagtggacaatgccaatgtccttctgcagattgacaatgcccgtctggccgcggatgacttccgcaccaagtatgagacagagttgaacctgcgcatgagtgtggaagccgacatcaatggcctgcgcagggtgctggacgaactgaccctggccagagctgacctggagatgcagattgagagcctgaaggaggagctggcctacctgaagaagaaccacgaggaggagatgaatgccctgagaggccaggtgggtggagatgtcaatgtggagatggacgctgcacctggcgtggacctgagccgcattctgaacgagatgcgtgaccagtatgagaagatggcagagaagaaccgcaaggatgccgaggaatggttcttcaccaagacagaggagctgaaccgcgaggtggccaccaacagcgagctggtgcagagcggcaagagcgagatctcggagctccggcgcaccatgcagaacctggagattgagctgcagtcccagctcagcatgaaagcatccctggagaacagcctggaggagaccaaaggtcgctactgcatgcagctggcccagatccaggagatgattggcagcgtggaggagcagctggcccagctccgctgcgagatggagcagcagaaccaggagtacaagatcctgctggacgtgaagacgcggctggagcaggagatcgccacctaccgccgcctgctggagggcgaggacgcccacctctcctcctcccagttctcctctggatcgcagtcatccagagatgtgacctcctccagccgccaaatccgcaccaaggtcatggatgtgcacgatggcaaggtggtgtccacccacgagcaggtccttcgcaccaagaactgaggctgcccagccccgctcaggcctaggaggccccccgtgtggacacagatcccactggaagatcccctctcctgcccaagcacttcacagctggaccctgcttcaccctcaccccctcctggcaatcaatacagcttcattatctgagttgcatacccgagcaccttctcttcactcagccaactgctcgctcgctcacctccctcctctgcaccatgaccacctgcagccgccagttcacctcctccagctccatgaagggctcctgcggcatcgggggcggcatcgggggcggctccagccgcatctcctccgtcctggccggagggtcctgccgcgcccccagcacctacgggggcggcctgtctgtctcatcctcccgcttctcctctgggggagcctgcgggctggggggcggctatggcggtggcttcagcagcagcagcagcagctttggtagtggctttgggggaggatatggtggtggccttggtgctggcttgggtggtggctttggtggtggctttgctggtggtgatgggcttctggtgggcagtgagaaggtgaccatgcagaacctcaatgaccgcctggcctcctacctggacaaggtgcgtgctctggaggaggccaacgccgacctggaagtgaagatccgtgactggtaccagaggcagcggcctgctgagatcaaagactacagtccctacttcaagaccattgaggacctgaggaacaagattctcacagccacagtggacaatgccaatgtccttctgcagattgacaatgcccgtctggccgcggatgacttccgcaccaagtatgagacagagttgaacctgcgcatgagtgtggaagccgacatcaatggcctgcgcagggtgctggacgaactgaccctggccagagctgacctggagatgcagattgagagcctgaaggaggagctggcctacctgaagaagaaccacgaggaggagatgaatgccctgagaggccaggtgggtggagatgtcaatgtggagatggacgctgcacctggcgtggacctgagccgcattctgaacgagatgcgtgaccagtatgagaagatggcagagaagaaccgcaaggatgccgaggaatggttcttcaccaagacagaggagctgaaccgcgaggtggccaccaacagcgagctggtgcagagcggcaagagcgagatctcggagctccggcgcaccatgcagaacctggagattgagctgcagtcccagctcagcatgaaagcatccctggagaacagcctggaggagaccaaaggtcgctactgcatgcagctggcccagatccaggagatgattggcagcgtggaggagcagctggcccagctccgctgcgagatggagcagcagaaccaggagtacaagatcctgctggacgtgaagacgcggctggagcaggagatcgccacctaccgccgcctgctggagggcgaggacgcccacctctcctcctcccagttctcctctggatcgcagtcatccagagatgtgacctcctccagccgccaaatccgcaccaaggtcatggatgtgcacgatggcaaggtggtgtccacccacgagcaggtccttcgcaccaagaactgaggctgcccagccccgctcaggcctaggaggccccccgtgtggacacagatcccactggaagatcccctctcctgcccaagcacttcacagctggaccctgcttcaccctcaccccctcctggcaatcaatacagcttcattatctgagttgcatacccgagcaccttctcttcactcagccaactgctcgctcgctcacctccctcctctgcaccatgaccacctgcagccgccagttcacctcctccagctccatgaagggctcctgcggcatcgggggcggcatcgggggcggctccagccgcatctcctccgtcctggccggagggtcctgccgcgcccccagcacctacgggggcggcctgtctgtctcatcctcccgcttctcctctgggggagcctgcgggctggggggcggctatggcggtggcttcagcagcagcagcagcagctttggtagtggctttgggggaggatatggtggtggccttggtgctggcttgggtggtggctttggtggtggctttgctggtggtgatgggcttctggtgggcagtgagaaggtgaccatgcagaacctcaatgaccgcctggcctcctacctggacaaggtgcgtgctctggaggaggccaacgccgacctggaagtgaagatccgtgactggtaccagaggcagcggcctgctgagatcaaagactacagtccctacttcaagaccattgaggacctgaggaacaagattctcacagccacagtggacaatgccaatgtccttctgcagattgacaatgcccgtctggccgcggatgacttccgcaccaagtatgagacagagttgaacctgcgcatgagtgtggaagccgacatcaatggcctgcgcagggtgctggacgaactgaccctggccagagctgacctggagatgcagattgagagcctgaaggaggagctggcctacctgaagaagaaccacgaggaggagatgaatgccctgagaggccaggtgggtggagatgtcaatgtggagatggacgctgcacctggcgtggacctgagccgcattctgaacgagatgcgtgaccagtatgagaagatggcagagaagaaccgcaaggatgccgaggaatggttcttcaccaagacagaggagctgaaccgcgaggtggccaccaacagcgagctggtgcagagcggcaagagcgagatctcggagctccggcgcaccatgcagaacctggagattgagctgcagtcccagctcagcatgaaagcatccctggagaacagcctggaggagaccaaaggtcgctactgcatgcagctggcccagatccaggagatgattggcagcgtggaggagcagctggcccagctccgctgcgagatggagcagcagaaccaggagtacaagatcctgctggacgtgaagacgcggctggagcaggagatcgccacctaccgccgcctgctggagggcgaggacgcccacctctcctcctcccagttctcctctggatcgcagtcatccagagatgtgacctcctccagccgccaaatccgcaccaaggtcatggatgtgcacgatggcaaggtggtgtccacccacgagcaggtccttcgcaccaagaactgaggctgcccagccccgctcaggcctaggaggccccccgtgtggacacagatcccactggaagatcccctctcctgcccaagcacttcacagctggaccctgcttcaccctcaccccctcctggcaatcaatacagcttcattatctgagttgcatacccgagcaccttctcttcactcagccaactgctcgctcgctcacctccctcctctgcaccatgaccacctgcagccgccagttcacctcctccagctccatgaagggctcctgcggcatcgggggcggcatcgggggcggctccagccgcatctcctccgtcctggccggagggtcctgccgcgcccccagcacctacgggggcggcctgtctgtctcatcctcccgcttctcctctgggggagcctgcgggctggggggcggctatggcggtggcttcagcagcagcagcagcagctttggtagtggctttgggggaggatatggtggtggccttggtgctggcttgggtggtggctttggtggtggctttgctggtggtgatgggcttctggtgggcagtgagaaggtgaccatgcagaacctcaatgaccgcctggcctcctacctggacaaggtgcgtgctctggaggaggccaacgccgacctggaagtgaagatccgtgactggtaccagaggcagcggcctgctgagatcaaagactacagtccctacttcaagaccattgaggacctgaggaacaagattctcacagccacagtggacaatgccaatgtccttctgcagattgacaatgcccgtctggccgcggatgacttccgcaccaagtatgagacagagttgaacctgcgcatgagtgtggaagccgacatcaatggcctgcgcagggtgctggacgaactgaccctggccagagctgacctggagatgcagattgagagcctgaaggaggagctggcctacctgaagaagaaccacgaggaggagatgaatgccctgagaggccaggtgggtggagatgtcaatgtggagatggacgctgcacctggcgtggacctgagccgcattctgaacgagatgcgtgaccagtatgagaagatggcagagaagaaccgcaaggatgccgaggaatggttcttcaccaagacagaggagctgaaccgcgaggtggccaccaacagcgagctggtgcagagcggcaagagcgagatctcggagctccggcgcaccatgcagaacctggagattgagctgcagtcccagctcagcatgaaagcatccctggagaacagcctggaggagaccaaaggtcgctactgcatgcagctggcccagatccaggagatgattggcagcgtggaggagcagctggcccagctccgctgcgagatggagcagcagaaccaggagtacaagatcctgctggacgtgaagacgcggctggagcaggagatcgccacctaccgccgcctgctggagggcgaggacgcccacctctcctcctcccagttctcctctggatcgcagtcatccagagatgtgacctcctccagccgccaaatccgcaccaaggtcatggatgtgcacgatggcaaggtggtgtccacccacgagcaggtccttcgcaccaagaactgaggctgcccagccccgctcaggcctaggaggccccccgtgtggacacagatcccactggaagatcccctctcctgcccaagcacttcacagctggaccctgcttcaccctcaccccctcctggcaatcaatacagcttcattatctgagttgcatacccgagcaccttctcttcactcagccaactgctcgctcgctcacctccctcctctgcaccatgaccacctgcagccgccagttcacctcctccagctccatgaagggctcctgcggcatcgggggcggcatcgggggcggctccagccgcatctcctccgtcctggccggagggtcctgccgcgcccccagcacctacgggggcggcctgtctgtctcatcctcccgcttctcctctgggggagcctgcgggctggggggcggctatggcggtggcttcagcagcagcagcagcagctttggtagtggctttgggggaggatatggtggtggccttggtgctggcttgggtggtggctttggtggtggctttgctggtggtgatgggcttctggtgggcagtgagaaggtgaccatgcagaacctcaatgaccgcctggcctcctacctggacaaggtgcgtgctctggaggaggccaacgccgacctggaagtgaagatccgtgactggtaccagaggcagcggcctgctgagatcaaagactacagtccctacttcaagaccattgaggacctgaggaacaagattctcacagccacagtggacaatgccaatgtccttctgcagattgacaatgcccgtctggccgcggatgacttccgcaccaagtatgagacagagttgaacctgcgcatgagtgtggaagccgacatcaatggcctgcgcagggtgctggacgaactgaccctggccagagctgacctggagatgcagattgagagcctgaaggaggagctggcctacctgaagaagaaccacgaggaggagatgaatgccctgagaggccaggtgggtggagatgtcaatgtggagatggacgctgcacctggcgtggacctgagccgcattctgaacgagatgcgtgaccagtatgagaagatggcagagaagaaccgcaaggatgccgaggaatggttcttcaccaagacagaggagctgaaccgcgaggtggccaccaacagcgagctggtgcagagcggcaagagcgagatctcggagctccggcgcaccatgcagaacctggagattgagctgcagtcccagctcagcatgaaagcatccctggagaacagcctggaggagaccaaaggtcgctactgcatgcagctggcccagatccaggagatgattggcagcgtggaggagcagctggcccagctccgctgcgagatggagcagcagaaccaggagtacaagatcctgctggacgtgaagacgcggctggagcaggagatcgccacctaccgccgcctgctggagggcgaggacgcccacctctcctcctcccagttctcctctggatcgcagtcatccagagatgtgacctcctccagccgccaaatccgcaccaaggtcatggatgtgcacgatggcaaggtggtgtccacccacgagcaggtccttcgcaccaagaactgaggctgcccagccccgctcaggcctaggaggccccccgtgtggacacagatcccactggaagatcccctctcctgcccaagcacttcacagctggaccctgcttcaccctcaccccctcctggcaatcaatacagcttcattatctgagttgcatacccgagcaccttctcttcactcagccaactgctcgctcgctcacctccctcctctgcaccatgaccacctgcagccgccagttcacctcctccagctccatgaagggctcctgcggcatcgggggcggcatcgggggcggctccagccgcatctcctccgtcctggccggagggtcctgccgcgcccccagcacctacgggggcggcctgtctgtctcatcctcccgcttctcctctgggggagcctgcgggctggggggcggctatggcggtggcttcagcagcagcagcagcagctttggtagtggctttgggggaggatatggtggtggccttggtgctggcttgggtggtggctttggtggtggctttgctggtggtgatgggcttctggtgggcagtgagaaggtgaccatgcagaacctcaatgaccgcctggcctcctacctggacaaggtgcgtgctctggaggaggccaacgccgacctggaagtgaagatccgtgactggtaccagaggcagcggcctgctgagatcaaagactacagtccctacttcaagaccattgaggacctgaggaacaagattctcacagccacagtggacaatgccaatgtccttctgcagattgacaatgcccgtctggccgcggatgacttccgcaccaagtatgagacagagttgaacctgcgcatgagtgtggaagccgacatcaatggcctgcgcagggtgctggacgaactgaccctggccagagctgacctggagatgcagattgagagcctgaaggaggagctggcctacctgaagaagaaccacgaggaggagatgaatgccctgagaggccaggtgggtggagatgtcaatgtggagatggacgctgcacctggcgtggacctgagccgcattctgaacgagatgcgtgaccagtatgagaagatggcagagaagaaccgcaaggatgccgaggaatggttcttcaccaagacagaggagctgaaccgcgaggtggccaccaacagcgagctggtgcagagcggcaagagcgagatctcggagctccggcgcaccatgcagaacctggagattgagctgcagtcccagctcagcatgaaagcatccctggagaacagcctggaggagaccaaaggtcgctactgcatgcagctggcccagatccaggagatgattggcagcgtggaggagcagctggcccagctccgctgcgagatggagcagcagaaccaggagtacaagatcctgctggacgtgaagacgcggctggagcaggagatcgccacctaccgccgcctgctggagggcgaggacgcccacctctcctcctcccagttctcctctggatcgcagtcatccagagatgtgacctcctccagccgccaaatccgcaccaaggtcatggatgtgcacgatggcaaggtggtgtccacccacgagcaggtccttcgcaccaagaactgaggctgcccagccccgctcaggcctaggaggccccccgtgtggacacagatcccactggaagatcccctctcctgcccaagcacttcacagctggaccctgcttcaccctcaccccctcctggcaatcaatacagcttcattatctgagttgcatacccgagcaccttctcttcactcagccaactgctcgctcgctcacctccctcctctgcaccatgaccacctgcagccgccagttcacctcctccagctccatgaagggctcctgcggcatcgggggcggcatcgggggcggctccagccgcatctcctccgtcctggccggagggtcctgccgcgcccccagcacctacgggggcggcctgtctgtctcatcctcccgcttctcctctgggggagcctgcgggctggggggcggctatggcggtggcttcagcagcagcagcagcagctttggtagtggctttgggggaggatatggtggtggccttggtgctggcttgggtggtggctttggtggtggctttgctggtggtgatgggcttctggtgggcagtgagaaggtgaccatgcagaacctcaatgaccgcctggcctcctacctggacaaggtgcgtgctctggaggaggccaacgccgacctggaagtgaagatccgtgactggtaccagaggcagcggcctgctgagatcaaagactacagtccctacttcaagaccattgaggacctgaggaacaagattctcacagccacagtggacaatgccaatgtccttctgcagattgacaatgcccgtctggccgcggatgacttccgcaccaagtatgagacagagttgaacctgcgcatgagtgtggaagccgacatcaatggcctgcgcagggtgctggacgaactgaccctggccagagctgacctggagatgcagattgagagcctgaaggaggagctggcctacctgaagaagaaccacgaggaggagatgaatgccctgagaggccaggtgggtggagatgtcaatgtggagatggacgctgcacctggcgtggacctgagccgcattctgaacgagatgcgtgaccagtatgagaagatggcagagaagaaccgcaaggatgccgaggaatggttcttcaccaagacagaggagctgaaccgcgaggtggccaccaacagcgagctggtgcagagcggcaagagcgagatctcggagctccggcgcaccatgcagaacctggagattgagctgcagtcccagctcagcatgaaagcatccctggagaacagcctggaggagaccaaaggtcgctactgcatgcagctggcccagatccaggagatgattggcagcgtggaggagcagctggcccagctccgctgcgagatggagcagcagaaccaggagtacaagatcctgctggacgtgaagacgcggctggagcaggagatcgccacctaccgccgcctgctggagggcgaggacgcccacctctcctcctcccagttctcctctggatcgcagtcatccagagatgtgacctcctccagccgccaaatccgcaccaaggtcatggatgtgcacgatggcaaggtggtgtccacccacgagcaggtccttcgcaccaagaactgaggctgcccagccccgctcaggcctaggaggccccccgtgtggacacagatcccactggaagatcccctctcctgcccaagcacttcacagctggaccctgcttcaccctcaccccctcctggcaatcaatacagcttcattatctgagttgcatacccgagcaccttctcttcactcagccaactgctcgctcgctcacctccctcctctgcaccatgaccacctgcagccgccagttcacctcctccagctccatgaagggctcctgcggcatcgggggcggcatcgggggcggctccagccgcatctcctccgtcctggccggagggtcctgccgcgcccccagcacctacgggggcggcctgtctgtctcatcctcccgcttctcctctgggggagcctgcgggctggggggcggctatggcggtggcttcagcagcagcagcagcagctttggtagtggctttgggggaggatatggtggtggccttggtgctggcttgggtggtggctttggtggtggctttgctggtggtgatgggcttctggtgggcagtgagaaggtgaccatgcagaacctcaatgaccgcctggcctcctacctggacaaggtgcgtgctctggaggaggccaacgccgacctggaagtgaagatccgtgactggtaccagaggcagcggcctgctgagatcaaagactacagtccctacttcaagaccattgaggacctgaggaacaagattctcacagccacagtggacaatgccaatgtccttctgcagattgacaatgcccgtctggccgcggatgacttccgcaccaagtatgagacagagttgaacctgcgcatgagtgtggaagccgacatcaatggcctgcgcagggtgctggacgaactgaccctggccagagctgacctggagatgcagattgagagcctgaaggaggagctggcctacctgaagaagaaccacgaggaggagatgaatgccctgagaggccaggtgggtggagatgtcaatgtggagatggacgctgcacctggcgtggacctgagccgcattctgaacgagatgcgtgaccagtatgagaagatggcagagaagaaccgcaaggatgccgaggaatggttcttcaccaagacagaggagctgaaccgcgaggtggccaccaacagcgagctggtgcagagcggcaagagcgagatctcggagctccggcgcaccatgcagaacctggagattgagctgcagtcccagctcagcatgaaagcatccctggagaacagcctggaggagaccaaaggtcgctactgcatgcagctggcccagatccaggagatgattggcagcgtggaggagcagctggcccagctccgctgcgagatggagcagcagaaccaggagtacaagatcctgctggacgtgaagacgcggctggagcaggagatcgccacctaccgccgcctgctggagggcgaggacgcccacctctcctcctcccagttctcctctggatcgcagtcatccagagatgtgacctcctccagccgccaaatccgcaccaaggtcatggatgtgcacgatggcaaggtggtgtccacccacgagcaggtccttcgcaccaagaactgaggctgcccagccccgctcaggcctaggaggccccccgtgtggacacagatcccactggaagatcccctctcctgcccaagcacttcacagctggaccctgcttcaccctcaccccctcctggcaatcaatacagcttcattatctgagttgcat

SEQ ID NO: 987 - DNA, 24135 bp, Homo sapiens
  misc_feature (475)..(475): second gene starts at position 475
atgaccgagtgggagacagcagcaccagcggtggcagagaccccagacatcaagctctttgggaagtggagcaccgatgatgtgcagatcaatgacatttccctgcaggattacattgcagtgaaggagaagtatgccaagtacctgcctcacagtgcagggcggtatgccgccaaacgcttccgcaaagctcagtgtcccattgtggagcgcctcactaactccatgatgatgcacggccgcaacaacggcaagaagctcatgactgtgcgcatcgtcaagcatgccttcgagatcatacacctgctcacaggcgagaaccctctgcaggtcctggtgaacgccatcatcaacagtggtccccgggaggactccacacgcattgggcgcgccgggactgtgagacgacaggctgtggatgtgtcccccctgcgccgtgtgaaccaggccatctggctgctgtgcacaggcgctggttacggcagcacttttatttttccttacacaatgacgtgttgctggggcctaatgttctcacataacagtagaaaaccaaaatttgttgtcatctcttcaaagaatcgagaattgcgtacaaaaaaaaccttacataaattaagaatgaatacatttacaggcgtaaatgcaaaccgcttccaactcaaagcaagtaacagcccacggtgttctggccaaagacatcagctaagaaaggaaactgggtcctacggcttggactttccaaccctgacagacccgcaagacaaaacaactggttcttgccagcctctagagaaatcccagaacactcagccctgacacgttaataccctgcacagatcagaggctgctggccacacagactcaccaagccacagacttgtcttccacaagcacgttcttaccttagccacgaagtgaccaagccacacgtactaaaggttgaactcaaagatatgtacagggtattaaacaaataccaaggggaacagttaacttcaatacaaggtcaaaatcagcaacaagttctacaatccagtgctgatatcagatacaagcttcaaggacaatttcttttcgaaggcttattccagtttcgtgaggctagcatgaggtgtgtgcatttgccaggggcaaatttctattctcaattaacccatgcagcaaatgctacgcatctgctgagtccgtttagaagcatttgcggtggacgatggaggggcccgactcgtcgtactcctgcttgctaatccacatctgctggaaggtggacagtgaggccaggatggagccaccgatccacaccgagtacttgcgctctgggggtgcgatgatcttgatcttcatggtgctgggcgccagggcggtgatctccttctgcatcctgtcggcaatgcccgggtacatggtggtgccgcccgacagcaccgtgttggcgtacaggtctttgcggatgtccacgtcacacttcatgatggagttgaaggtggtctcgtggatgccgcaagattccatacccaggaaggaaggctggaacagcgcctccggacaccggaaccgctcattgccaatggtgatgacctggccatcgggcagctcgtagctcttctccagagaagaggaggatgcggcggtggccatctcctgctcgaagtccagggcgacgtagcacagcttctccttgatgtcgcgcacgatttcccgctcggccgtggtggtgaagctgtagcctcgctcagtgaggatcttcatgaggtagtcggtcaggtcccggccagccaggtccagacgcaggatggcgtgggggagggcgtagccctcgtagatgggcaccgtgtgggtgaccccgtctccagagtccatgacaatgccagtggtgcgcccagaggcgtagagggacagcacggcctggatggccacgtacatggccggggtgttgaaggtctcaaacataatctgagtcatcttctctctgttggccttggggttcaggggggcctcggtcagcagcactgggtgctcctccggggccacgcgcagctcgttgtagaaggtgtggtgccagatcttctccatgtcgtcccagttggtgacgatgccatgctcaatggggtacttcagggtcaggatgccacgcttgctctgggcctcgtcgcccacgtaggagtccttctggcccatgcccaccatgacgccctggtgtctggggcgcccgacgatggaaggaaacacggctcggggagcgtcgtccccagcaaaaccagctttgcacatgccggagccattgtcaatgaccagcgcggcgatctcttcttccattgcgaccggcagagaaacgcgacggcggagcggcggaagaacagagtgcgagagctggcagcggcgactgagacggttacggcagcacttttatttttccttacacaatgacgtgttgctggggcctaatgttctcacataacagtagaaaaccaaaatttgttgtcatctcttcaaagaatcgagaattgcgtacaaaaaaaaccttacataaattaagaatgaatacatttacaggcgtaaatgcaaaccgcttccaactcaaagcaagtaacagcccacggtgttctggccaaagacatcagctaagaaaggaaactgggtcctacggcttggactttccaaccctgacagacccgcaagacaaaacaactggttcttgccagcctctagagaaatcccagaacactcagccctgacacgttaataccctgcacagatcagaggctgctggccacacagactcaccaagccacagacttgtcttccacaagcacgttcttaccttagccacgaagtgaccaagccacacgtactaaaggttgaactcaaagatatgtacagggtattaaacaaataccaaggggaacagttaacttcaatacaaggtcaaaatcagcaacaagttctacaatccagtgctgatatcagatacaagcttcaaggacaatttcttttcgaaggcttattccagtttcgtgaggctagcatgaggtgtgtgcatttgccaggggcaaatttctattctcaattaacccatgcagcaaatgctacgcatctgctgagtccgtttagaagcatttgcggtggacgatggaggggcccgactcgtcgtactcctgcttgctaatccacatctgctggaaggtggacagtgaggccaggatggagccaccgatccacaccgagtacttgcgctctgggggtgcgatgatcttgatcttcatggtgctgggcgccagggcggtgatctccttctgcatcctgtcggcaatgcccgggtacatggtggtgccgcccgacagcaccgtgttggcgtacaggtctttgcggatgtccacgtcacacttcatgatggagttgaaggtggtctcgtggatgccgcaagattccatacccaggaaggaaggctggaacagcgcctccggacaccggaaccgctcattgccaatggtgatgacctggccatcgggcagctcgtagctcttctccagagaagaggaggatgcggcggtggccatctcctgctcgaagtccagggcgacgtagcacagcttctccttgatgtcgcgcacgatttcccgctcggccgtggtggtgaagctgtagcctcgctcagtgaggatcttcatgaggtagtcggtcaggtcccggccagccaggtccagacgcaggatggcgtgggggagggcgtagccctcgtagatgggcaccgtgtgggtgaccccgtctccagagtccatgacaatgccagtggtgcgcccagaggcgtagagggacagcacggcctggatggccacgtacatggccggggtgttgaaggtctcaaacataatctgagtcatcttctctctgttggccttggggttcaggggggcctcggtcagcagcactgggtgctcctccggggccacgcgcagctcgttgtagaaggtgtggtgccagatcttctccatgtcgtcccagttggtgacgatgccatgctcaatggggtacttcagggtcaggatgccacgcttgctctgggcctcgtcgcccacgtaggagtccttctggcccatgcccaccatgacgccctggtgtctggggcgcccgacgatggaaggaaacacggctcggggagcgtcgtccccagcaaaaccagctttgcacatgccggagccattgtcaatgaccagcgcggcgatctcttcttccattgcgaccggcagagaaacgcgacggcggagcggcggaagaacagagtgcgagagctggcagcggcgactgagacggttacggcagcacttttatttttccttacacaatgacgtgttgctggggcctaatgttctcacataacagtagaaaaccaaaatttgttgtcatctcttcaaagaatcgagaattgcgtacaaaaaaaaccttacataaattaagaatgaatacatttacaggcgtaaatgcaaaccgcttccaactcaaagcaagtaacagcccacggtgttctggccaaagacatcagctaagaaaggaaactgggtcctacggcttggactttccaaccctgacagacccgcaagacaaaacaactggttcttgccagcctctagagaaatcccagaacactcagccctgacacgttaataccctgcacagatcagaggctgctggccacacagactcaccaagccacagacttgtcttccacaagcacgttcttaccttagccacgaagtgaccaagccacacgtactaaaggttgaactcaaagatatgtacagggtattaaacaaataccaaggggaacagttaacttcaatacaaggtcaaaatcagcaacaagttctacaatccagtgctgatatcagatacaagcttcaaggacaatttcttttcgaaggcttattccagtttcgtgaggctagcatgaggtgtgtgcatttgccaggggcaaatttctattctcaattaacccatgcagcaaatgctacgcatctgctgagtccgtttagaagcatttgcggtggacgatggaggggcccgactcgtcgtactcctgcttgctaatccacatctgctggaaggtggacagtgaggccaggatggagccaccgatccacaccgagtacttgcgctctgggggtgcgatgatcttgatcttcatggtgctgggcgccagggcggtgatctccttctgcatcctgtcggcaatgcccgggtacatggtggtgccgcccgacagcaccgtgttggcgtacaggtctttgcggatgtccacgtcacacttcatgatggagttgaaggtggtctcgtggatgccgcaagattccatacccaggaaggaaggctggaacagcgcctccggacaccggaaccgctcattgccaatggtgatgacctggccatcgggcagctcgtagctcttctccagagaagaggaggatgcggcggtggccatctcctgctcgaagtccagggcgacgtagcacagcttctccttgatgtcgcgcacgatttcccgctcggccgtggtggtgaagctgtagcctcgctcagtgaggatcttcatgaggtagtcggtcaggtcccggccagccaggtccagacgcaggatggcgtgggggagggcgtagccctcgtagatgggcaccgtgtgggtgaccccgtctccagagtccatgacaatgccagtggtgcgcccagaggcgtagagggacagcacggcctggatggccacgtacatggccggggtgttgaaggtctcaaacataatctgagtcatcttctctctgttggccttggggttcaggggggcctcggtcagcagcactgggtgctcctccggggccacgcgcagctcgttgtagaaggtgtggtgccagatcttctccatgtcgtcccagttggtgacgatgccatgctcaatggggtacttcagggtcaggatgccacgcttgctctgggcctcgtcgcccacgtaggagtccttctggcccatgcccaccatgacgccctggtgtctggggcgcccgacgatggaaggaaacacggctcggggagcgtcgtccccagcaaaaccagctttgcacatgccggagccattgtcaatgaccagcgcggcgatctcttcttccattgcgaccggcagagaaacgcgacggcggagcggcggaagaacagagtgcgagagctggcagcggcgactgagacggttacggcagcacttttatttttccttacacaatgacgtgttgctggggcctaatgttctcacataacagtagaaaaccaaaatttgttgtcatctcttcaaagaatcgagaattgcgtacaaaaaaaaccttacataaattaagaatgaatacatttacaggcgtaaatgcaaaccgcttccaactcaaagcaagtaacagcccacggtgttctggccaaagacatcagctaagaaaggaaactgggtcctacggcttggactttccaaccctgacagacccgcaagacaaaacaactggttcttgccagcctctagagaaatcccagaacactcagccctgacacgttaataccctgcacagatcagaggctgctggccacacagactcaccaagccacagacttgtcttccacaagcacgttcttaccttagccacgaagtgaccaagccacacgtactaaaggttgaactcaaagatatgtacagggtattaaacaaataccaaggggaacagttaacttcaatacaaggtcaaaatcagcaacaagttctacaatccagtgctgatatcagatacaagcttcaaggacaatttcttttcgaaggcttattccagtttcgtgaggctagcatgaggtgtgtgcatttgccaggggcaaatttctattctcaattaacccatgcagcaaatgctacgcatctgctgagtccgtttagaagcatttgcggtggacgatggaggggcccgactcgtcgtactcctgcttgctaatccacatctgctggaaggtggacagtgaggccaggatggagccaccgatccacaccgagtacttgcgctctgggggtgcgatgatcttgatcttcatggtgctgggcgccagggcggtgatctccttctgcatcctgtcggcaatgcccgggtacatggtggtgccgcccgacagcaccgtgttggcgtacaggtctttgcggatgtccacgtcacacttcatgatggagttgaaggtggtctcgtggatgccgcaagattccatacccaggaaggaaggctggaacagcgcctccggacaccggaaccgctcattgccaatggtgatgacctggccatcgggcagctcgtagctcttctccagagaagaggaggatgcggcggtggccatctcctgctcgaagtccagggcgacgtagcacagcttctccttgatgtcgcgcacgatttcccgctcggccgtggtggtgaagctgtagcctcgctcagtgaggatcttcatgaggtagtcggtcaggtcccggccagccaggtccagacgcaggatggcgtgggggagggcgtagccctcgtagatgggcaccgtgtgggtgaccccgtctccagagtccatgacaatgccagtggtgcgcccagaggcgtagagggacagcacggcctggatggccacgtacatggccggggtgttgaaggtctcaaacataatctgagtcatcttctctctgttggccttggggttcaggggggcctcggtcagcagcactgggtgctcctccggggccacgcgcagctcgttgtagaaggtgtggtgccagatcttctccatgtcgtcccagttggtgacgatgccatgctcaatggggtacttcagggtcaggatgccacgcttgctctgggcctcgtcgcccacgtaggagtccttctggcccatgcccaccatgacgccctggtgtctggggcgcccgacgatggaaggaaacacggctcggggagcgtcgtccccagcaaaaccagctttgcacatgccggagccattgtcaatgaccagcgcggcgatctcttcttccattgcgaccggcagagaaacgcgacggcggagcggcggaagaacagagtgcgagagctggcagcggcgactgagacggttacggcagcacttttatttttccttacacaatgacgtgttgctggggcctaatgttctcacataacagtagaaaaccaaaatttgttgtcatctcttcaaagaatcgagaattgcgtacaaaaaaaaccttacataaattaagaatgaatacatttacaggcgtaaatgcaaaccgcttccaactcaaagcaagtaacagcccacggtgttctggccaaagacatcagctaagaaaggaaactgggtcctacggcttggactttccaaccctgacagacccgcaagacaaaacaactggttcttgccagcctctagagaaatcccagaacactcagccctgacacgttaataccctgcacagatcagaggctgctggccacacagactcaccaagccacagacttgtcttccacaagcacgttcttaccttagccacgaagtgaccaagccacacgtactaaaggttgaactcaaagatatgtacagggtattaaacaaataccaaggggaacagttaacttcaatacaaggtcaaaatcagcaacaagttctacaatccagtgctgatatcagatacaagcttcaaggacaatttcttttcgaaggcttattccagtttcgtgaggctagcatgaggtgtgtgcatttgccaggggcaaatttctattctcaattaacccatgcagcaaatgctacgcatctgctgagtccgtttagaagcatttgcggtggacgatggaggggcccgactcgtcgtactcctgcttgctaatccacatctgctggaaggtggacagtgaggccaggatggagccaccgatccacaccgagtacttgcgctctgggggtgcgatgatcttgatcttcatggtgctgggcgccagggcggtgatctccttctgcatcctgtcggcaatgcccgggtacatggtggtgccgcccgacagcaccgtgttggcgtacaggtctttgcggatgtccacgtcacacttcatgatggagttgaaggtggtctcgtggatgccgcaagattccatacccaggaaggaaggctggaacagcgcctccggacaccggaaccgctcattgccaatggtgatgacctggccatcgggcagctcgtagctcttctccagagaagaggaggatgcggcggtggccatctcctgctcgaagtccagggcgacgtagcacagcttctccttgatgtcgcgcacgatttcccgctcggccgtggtggtgaagctgtagcctcgctcagtgaggatcttcatgaggtagtcggtcaggtcccggccagccaggtccagacgcaggatggcgtgggggagggcgtagccctcgtagatgggcaccgtgtgggtgaccccgtctccagagtccatgacaatgccagtggtgcgcccagaggcgtagagggacagcacggcctggatggccacgtacatggccggggtgttgaaggtctcaaacataatctgagtcatcttctctctgttggccttggggttcaggggggcctcggtcagcagcactgggtgctcctccggggccacgcgcagctcgttgtagaaggtgtggtgccagatcttctccatgtcgtcccagttggtgacgatgccatgctcaatggggtacttcagggtcaggatgccacgcttgctctgggcctcgtcgcccacgtaggagtccttctggcccatgcccaccatgacgccctggtgtctggggcgcccgacgatggaaggaaacacggctcggggagcgtcgtccccagcaaaaccagctttgcacatgccggagccattgtcaatgaccagcgcggcgatctcttcttccattgcgaccggcagagaaacgcgacggcggagcggcggaagaacagagtgcgagagctggcagcggcgactgagacggttacggcagcacttttatttttccttacacaatgacgtgttgctggggcctaatgttctcacataacagtagaaaaccaaaatttgttgtcatctcttcaaagaatcgagaattgcgtacaaaaaaaaccttacataaattaagaatgaatacatttacaggcgtaaatgcaaaccgcttccaactcaaagcaagtaacagcccacggtgttctggccaaagacatcagctaagaaaggaaactgggtcctacggcttggactttccaaccctgacagacccgcaagacaaaacaactggttcttgccagcctctagagaaatcccagaacactcagccctgacacgttaataccctgcacagatcagaggctgctggccacacagactcaccaagccacagacttgtcttccacaagcacgttcttaccttagccacgaagtgaccaagccacacgtactaaaggttgaactcaaagatatgtacagggtattaaacaaataccaaggggaacagttaacttcaatacaaggtcaaaatcagcaacaagttctacaatccagtgctgatatcagatacaagcttcaaggacaatttcttttcgaaggcttattccagtttcgtgaggctagcatgaggtgtgtgcatttgccaggggcaaatttctattctcaattaacccatgcagcaaatgctacgcatctgctgagtccgtttagaagcatttgcggtggacgatggaggggcccgactcgtcgtactcctgcttgctaatccacatctgctggaaggtggacagtgaggccaggatggagccaccgatccacaccgagtacttgcgctctgggggtgcgatgatcttgatcttcatggtgctgggcgccagggcggtgatctccttctgcatcctgtcggcaatgcccgggtacatggtggtgccgcccgacagcaccgtgttggcgtacaggtctttgcggatgtccacgtcacacttcatgatggagttgaaggtggtctcgtggatgccgcaagattccatacccaggaaggaaggctggaacagcgcctccggacaccggaaccgctcattgccaatggtgatgacctggccatcgggcagctcgtagctcttctccagagaagaggaggatgcggcggtggccatctcctgctcgaagtccagggcgacgtagcacagcttctccttgatgtcgcgcacgatttcccgctcggccgtggtggtgaagctgtagcctcgctcagtgaggatcttcatgaggtagtcggtcaggtcccggccagccaggtccagacgcaggatggcgtgggggagggcgtagccctcgtagatgggcaccgtgtgggtgaccccgtctccagagtccatgacaatgccagtggtgcgcccagaggcgtagagggacagcacggcctggatggccacgtacatggccggggtgttgaaggtctcaaacataatctgagtcatcttctctctgttggccttggggttcaggggggcctcggtcagcagcactgggtgctcctccggggccacgcgcagctcgttgtagaaggtgtggtgccagatcttctccatgtcgtcccagttggtgacgatgccatgctcaatggggtacttcagggtcaggatgccacgcttgctctgggcctcgtcgcccacgtaggagtccttctggcccatgcccaccatgacgccctggtgtctggggcgcccgacgatggaaggaaacacggctcggggagcgtcgtccccagcaaaaccagctttgcacatgccggagccattgtcaatgaccagcgcggcgatctcttcttccattgcgaccggcagagaaacgcgacggcggagcggcggaagaacagagtgcgagagctggcagcggcgactgagacggttacggcagcacttttatttttccttacacaatgacgtgttgctggggcctaatgttctcacataacagtagaaaaccaaaatttgttgtcatctcttcaaagaatcgagaattgcgtacaaaaaaaaccttacataaattaagaatgaatacatttacaggcgtaaatgcaaaccgcttccaactcaaagcaagtaacagcccacggtgttctggccaaagacatcagctaagaaaggaaactgggtcctacggcttggactttccaaccctgacagacccgcaagacaaaacaactggttcttgccagcctctagagaaatcccagaacactcagccctgacacgttaataccctgcacagatcagaggctgctggccacacagactcaccaagccacagacttgtcttccacaagcacgttcttaccttagccacgaagtgaccaagccacacgtactaaaggttgaactcaaagatatgtacagggtattaaacaaataccaaggggaacagttaacttcaatacaaggtcaaaatcagcaacaagttctacaatccagtgctgatatcagatacaagcttcaaggacaatttcttttcgaaggcttattccagtttcgtgaggctagcatgaggtgtgtgcatttgccaggggcaaatttctattctcaattaacccatgcagcaaatgctacgcatctgctgagtccgtttagaagcatttgcggtggacgatggaggggcccgactcgtcgtactcctgcttgctaatccacatctgctggaaggtggacagtgaggccaggatggagccaccgatccacaccgagtacttgcgctctgggggtgcgatgatcttgatcttcatggtgctgggcgccagggcggtgatctccttctgcatcctgtcggcaatgcccgggtacatggtggtgccgcccgacagcaccgtgttggcgtacaggtctttgcggatgtccacgtcacacttcatgatggagttgaaggtggtctcgtggatgccgcaagattccatacccaggaaggaaggctggaacagcgcctccggacaccggaaccgctcattgccaatggtgatgacctggccatcgggcagctcgtagctcttctccagagaagaggaggatgcggcggtggccatctcctgctcgaagtccagggcgacgtagcacagcttctccttgatgtcgcgcacgatttcccgctcggccgtggtggtgaagctgtagcctcgctcagtgaggatcttcatgaggtagtcggtcaggtcccggccagccaggtccagacgcaggatggcgtgggggagggcgtagccctcgtagatgggcaccgtgtgggtgaccccgtctccagagtccatgacaatgccagtggtgcgcccagaggcgtagagggacagcacggcctggatggccacgtacatggccggggtgttgaaggtctcaaacataatctgagtcatcttctctctgttggccttggggttcaggggggcctcggtcagcagcactgggtgctcctccggggccacgcgcagctcgttgtagaaggtgtggtgccagatcttctccatgtcgtcccagttggtgacgatgccatgctcaatggggtacttcagggtcaggatgccacgcttgctctgggcctcgtcgcccacgtaggagtccttctggcccatgcccaccatgacgccctggtgtctggggcgcccgacgatggaaggaaacacggctcggggagcgtcgtccccagcaaaaccagctttgcacatgccggagccattgtcaatgaccagcgcggcgatctcttcttccattgcgaccggcagagaaacgcgacggcggagcggcggaagaacagagtgcgagagctggcagcggcgactgagacggttacggcagcacttttatttttccttacacaatgacgtgttgctggggcctaatgttctcacataacagtagaaaaccaaaatttgttgtcatctcttcaaagaatcgagaattgcgtacaaaaaaaaccttacataaattaagaatgaatacatttacaggcgtaaatgcaaaccgcttccaactcaaagcaagtaacagcccacggtgttctggccaaagacatcagctaagaaaggaaactgggtcctacggcttggactttccaaccctgacagacccgcaagacaaaacaactggttcttgccagcctctagagaaatcccagaacactcagccctgacacgttaataccctgcacagatcagaggctgctggccacacagactcaccaagccacagacttgtcttccacaagcacgttcttaccttagccacgaagtgaccaagccacacgtactaaaggttgaactcaaagatatgtacagggtattaaacaaataccaaggggaacagttaacttcaatacaaggtcaaaatcagcaacaagttctacaatccagtgctgatatcagatacaagcttcaaggacaatttcttttcgaaggcttattccagtttcgtgaggctagcatgaggtgtgtgcatttgccaggggcaaatttctattctcaattaacccatgcagcaaatgctacgcatctgctgagtccgtttagaagcatttgcggtggacgatggaggggcccgactcgtcgtactcctgcttgctaatccacatctgctggaaggtggacagtgaggccaggatggagccaccgatccacaccgagtacttgcgctctgggggtgcgatgatcttgatcttcatggtgctgggcgccagggcggtgatctccttctgcatcctgtcggcaatgcccgggtacatggtggtgccgcccgacagcaccgtgttggcgtacaggtctttgcggatgtccacgtcacacttcatgatggagttgaaggtggtctcgtggatgccgcaagattccatacccaggaaggaaggctggaacagcgcctccggacaccggaaccgctcattgccaatggtgatgacctggccatcgggcagctcgtagctcttctccagagaagaggaggatgcggcggtggccatctcctgctcgaagtccagggcgacgtagcacagcttctccttgatgtcgcgcacgatttcccgctcggccgtggtggtgaagctgtagcctcgctcagtgaggatcttcatgaggtagtcggtcaggtcccggccagccaggtccagacgcaggatggcgtgggggagggcgtagccctcgtagatgggcaccgtgtgggtgaccccgtctccagagtccatgacaatgccagtggtgcgcccagaggcgtagagggacagcacggcctggatggccacgtacatggccggggtgttgaaggtctcaaacataatctgagtcatcttctctctgttggccttggggttcaggggggcctcggtcagcagcactgggtgctcctccggggccacgcgcagctcgttgtagaaggtgtggtgccagatcttctccatgtcgtcccagttggtgacgatgccatgctcaatggggtacttcagggtcaggatgccacgcttgctctgggcctcgtcgcccacgtaggagtccttctggcccatgcccaccatgacgccctggtgtctggggcgcccgacgatggaaggaaacacggctcggggagcgtcgtccccagcaaaaccagctttgcacatgccggagccattgtcaatgaccagcgcggcgatctcttcttccattgcgaccggcagagaaacgcgacggcggagcggcggaagaacagagtgcgagagctggcagcggcgactgagacggttacggcagcacttttatttttccttacacaatgacgtgttgctggggcctaatgttctcacataacagtagaaaaccaaaatttgttgtcatctcttcaaagaatcgagaattgcgtacaaaaaaaaccttacataaattaagaatgaatacatttacaggcgtaaatgcaaaccgcttccaactcaaagcaagtaacagcccacggtgttctggccaaagacatcagctaagaaaggaaactgggtcctacggcttggactttccaaccctgacagacccgcaagacaaaacaactggttcttgccagcctctagagaaatcccagaacactcagccctgacacgttaataccctgcacagatcagaggctgctggccacacagactcaccaagccacagacttgtcttccacaagcacgttcttaccttagccacgaagtgaccaagccacacgtactaaaggttgaactcaaagatatgtacagggtattaaacaaataccaaggggaacagttaacttcaatacaaggtcaaaatcagcaacaagttctacaatccagtgctgatatcagatacaagcttcaaggacaatttcttttcgaaggcttattccagtttcgtgaggctagcatgaggtgtgtgcatttgccaggggcaaatttctattctcaattaacccatgcagcaaatgctacgcatctgctgagtccgtttagaagcatttgcggtggacgatggaggggcccgactcgtcgtactcctgcttgctaatccacatctgctggaaggtggacagtgaggccaggatggagccaccgatccacaccgagtacttgcgctctgggggtgcgatgatcttgatcttcatggtgctgggcgccagggcggtgatctccttctgcatcctgtcggcaatgcccgggtacatggtggtgccgcccgacagcaccgtgttggcgtacaggtctttgcggatgtccacgtcacacttcatgatggagttgaaggtggtctcgtggatgccgcaagattccatacccaggaaggaaggctggaacagcgcctccggacaccggaaccgctcattgccaatggtgatgacctggccatcgggcagctcgtagctcttctccagagaagaggaggatgcggcggtggccatctcctgctcgaagtccagggcgacgtagcacagcttctccttgatgtcgcgcacgatttcccgctcggccgtggtggtgaagctgtagcctcgctcagtgaggatcttcatgaggtagtcggtcaggtcccggccagccaggtccagacgcaggatggcgtgggggagggcgtagccctcgtagatgggcaccgtgtgggtgaccccgtctccagagtccatgacaatgccagtggtgcgcccagaggcgtagagggacagcacggcctggatggccacgtacatggccggggtgttgaaggtctcaaacataatctgagtcatcttctctctgttggccttggggttcaggggggcctcggtcagcagcactgggtgctcctccggggccacgcgcagctcgttgtagaaggtgtggtgccagatcttctccatgtcgtcccagttggtgacgatgccatgctcaatggggtacttcagggtcaggatgccacgcttgctctgggcctcgtcgcccacgtaggagtccttctggcccatgcccaccatgacgccctggtgtctggggcgcccgacgatggaaggaaacacggctcggggagcgtcgtccccagcaaaaccagctttgcacatgccggagccattgtcaatgaccagcgcggcgatctcttcttccattgcgaccggcagagaaacgcgacggcggagcggcggaagaacagagtgcgagagctggcagcggcgactgagacggttacggcagcacttttatttttccttacacaatgacgtgttgctggggcctaatgttctcacataacagtagaaaaccaaaatttgttgtcatctcttcaaagaatcgagaattgcgtacaaaaaaaaccttacataaattaagaatgaatacatttacaggcgtaaatgcaaaccgcttccaactcaaagcaagtaacagcccacggtgttctggccaaagacatcagctaagaaaggaaactgggtcctacggcttggactttccaaccctgacagacccgcaagacaaaacaactggttcttgccagcctctagagaaatcccagaacactcagccctgacacgttaataccctgcacagatcagaggctgctggccacacagactcaccaagccacagacttgtcttccacaagcacgttcttaccttagccacgaagtgaccaagccacacgtactaaaggttgaactcaaagatatgtacagggtattaaacaaataccaaggggaacagttaacttcaatacaaggtcaaaatcagcaacaagttctacaatccagtgctgatatcagatacaagcttcaaggacaatttcttttcgaaggcttattccagtttcgtgaggctagcatgaggtgtgtgcatttgccaggggcaaatttctattctcaattaacccatgcagcaaatgctacgcatctgctgagtccgtttagaagcatttgcggtggacgatggaggggcccgactcgtcgtactcctgcttgctaatccacatctgctggaaggtggacagtgaggccaggatggagccaccgatccacaccgagtacttgcgctctgggggtgcgatgatcttgatcttcatggtgctgggcgccagggcggtgatctccttctgcatcctgtcggcaatgcccgggtacatggtggtgccgcccgacagcaccgtgttggcgtacaggtctttgcggatgtccacgtcacacttcatgatggagttgaaggtggtctcgtggatgccgcaagattccatacccaggaaggaaggctggaacagcgcctccggacaccggaaccgctcattgccaatggtgatgacctggccatcgggcagctcgtagctcttctccagagaagaggaggatgcggcggtggccatctcctgctcgaagtccagggcgacgtagcacagcttctccttgatgtcgcgcacgatttcccgctcggccgtggtggtgaagctgtagcctcgctcagtgaggatcttcatgaggtagtcggtcaggtcccggccagccaggtccagacgcaggatggcgtgggggagggcgtagccctcgtagatgggcaccgtgtgggtgaccccgtctccagagtccatgacaatgccagtggtgcgcccagaggcgtagagggacagcacggcctggatggccacgtacatggccggggtgttgaaggtctcaaacataatctgagtcatcttctctctgttggccttggggttcaggggggcctcggtcagcagcactgggtgctcctccggggccacgcgcagctcgttgtagaaggtgtggtgccagatcttctccatgtcgtcccagttggtgacgatgccatgctcaatggggtacttcagggtcaggatgccacgcttgctctgggcctcgtcgcccacgtaggagtccttctggcccatgcccaccatgacgccctggtgtctggggcgcccgacgatggaaggaaacacggctcggggagcgtcgtccccagcaaaaccagctttgcacatgccggagccattgtcaatgaccagcgcggcgatctcttcttccattgcgaccggcagagaaacgcgacggcggagcggcggaagaacagagtgcgagagctggcagcggcgactgagacggttacggcagcacttttatttttccttacacaatgacgtgttgctggggcctaatgttctcacataacagtagaaaaccaaaatttgttgtcatctcttcaaagaatcgagaattgcgtacaaaaaaaaccttacataaattaagaatgaatacatttacaggcgtaaatgcaaaccgcttccaactcaaagcaagtaacagcccacggtgttctggccaaagacatcagctaagaaaggaaactgggtcctacggcttggactttccaaccctgacagacccgcaagacaaaacaactggttcttgccagcctctagagaaatcccagaacactcagccctgacacgttaataccctgcacagatcagaggctgctggccacacagactcaccaagccacagacttgtcttccacaagcacgttcttaccttagccacgaagtgaccaagccacacgtactaaaggttgaactcaaagatatgtacagggtattaaacaaataccaaggggaacagttaacttcaatacaaggtcaaaatcagcaacaagttctacaatccagtgctgatatcagatacaagcttcaaggacaatttcttttcgaaggcttattccagtttcgtgaggctagcatgaggtgtgtgcatttgccaggggcaaatttctattctcaattaacccatgcagcaaatgctacgcatctgctgagtccgtttagaagcatttgcggtggacgatggaggggcccgactcgtcgtactcctgcttgctaatccacatctgctggaaggtggacagtgaggccaggatggagccaccgatccacaccgagtacttgcgctctgggggtgcgatgatcttgatcttcatggtgctgggcgccagggcggtgatctccttctgcatcctgtcggcaatgcccgggtacatggtggtgccgcccgacagcaccgtgttggcgtacaggtctttgcggatgtccacgtcacacttcatgatggagttgaaggtggtctcgtggatgccgcaagattccatacccaggaaggaaggctggaacagcgcctccggacaccggaaccgctcattgccaatggtgatgacctggccatcgggcagctcgtagctcttctccagagaagaggaggatgcggcggtggccatctcctgctcgaagtccagggcgacgtagcacagcttctccttgatgtcgcgcacgatttcccgctcggccgtggtggtgaagctgtagcctcgctcagtgaggatcttcatgaggtagtcggtcaggtcccggccagccaggtccagacgcaggatggcgtgggggagggcgtagccctcgtagatgggcaccgtgtgggtgaccccgtctccagagtccatgacaatgccagtggtgcgcccagaggcgtagagggacagcacggcctggatggccacgtacatggccggggtgttgaaggtctcaaacataatctgagtcatcttctctctgttggccttggggttcaggggggcctcggtcagcagcactgggtgctcctccggggccacgcgcagctcgttgtagaaggtgtggtgccagatcttctccatgtcgtcccagttggtgacgatgccatgctcaatggggtacttcagggtcaggatgccacgcttgctctgggcctcgtcgcccacgtaggagtccttctggcccatgcccaccatgacgccctggtgtctggggcgcccgacgatggaaggaaacacggctcggggagcgtcgtccccagcaaaaccagctttgcacatgccggagccattgtcaatgaccagcgcggcgatctcttcttccattgcgaccggcagagaaacgcgacggcggagcggcggaagaacagagtgcgagagctggcagcggcgactgagacggttacggcagcacttttatttttccttacacaatgacgtgttgctggggcctaatgttctcacataacagtagaaaaccaaaatttgttgtcatctcttcaaagaatcgagaattgcgtacaaaaaaaaccttacataaattaagaatgaatacatttacaggcgtaaatgcaaaccgcttccaactcaaagcaagtaacagcccacggtgttctggccaaagacatcagctaagaaaggaaactgggtcctacggcttggactttccaaccctgacagacccgcaagacaaaacaactggttcttgccagcctctagagaaatcccagaacactcagccctgacacgttaataccctgcacagatcagaggctgctggccacacagactcaccaagccacagacttgtcttccacaagcacgttcttaccttagccacgaagtgaccaagccacacgtactaaaggttgaactcaaagatatgtacagggtattaaacaaataccaaggggaacagttaacttcaatacaaggtcaaaatcagcaacaagttctacaatccagtgctgatatcagatacaagcttcaaggacaatttcttttcgaaggcttattccagtttcgtgaggctagcatgaggtgtgtgcatttgccaggggcaaatttctattctcaattaacccatgcagcaaatgctacgcatctgctgagtccgtttagaagcatttgcggtggacgatggaggggcccgactcgtcgtactcctgcttgctaatccacatctgctggaaggtggacagtgaggccaggatggagccaccgatccacaccgagtacttgcgctctgggggtgcgatgatcttgatcttcatggtgctgggcgccagggcggtgatctccttctgcatcctgtcggcaatgcccgggtacatggtggtgccgcccgacagcaccgtgttggcgtacaggtctttgcggatgtccacgtcacacttcatgatggagttgaaggtggtctcgtggatgccgcaagattccatacccaggaaggaaggctggaacagcgcctccggacaccggaaccgctcattgccaatggtgatgacctggccatcgggcagctcgtagctcttctccagagaagaggaggatgcggcggtggccatctcctgctcgaagtccagggcgacgtagcacagcttctccttgatgtcgcgcacgatttcccgctcggccgtggtggtgaagctgtagcctcgctcagtgaggatcttcatgaggtagtcggtcaggtcccggccagccaggtccagacgcaggatggcgtgggggagggcgtagccctcgtagatgggcaccgtgtgggtgaccccgtctccagagtccatgacaatgccagtggtgcgcccagaggcgtagagggacagcacggcctggatggccacgtacatggccggggtgttgaaggtctcaaacataatctgagtcatcttctctctgttggccttggggttcaggggggcctcggtcagcagcactgggtgctcctccggggccacgcgcagctcgttgtagaaggtgtggtgccagatcttctccatgtcgtcccagttggtgacgatgccatgctcaatggggtacttcagggtcaggatgccacgcttgctctgggcctcgtcgcccacgtaggagtccttctggcccatgcccaccatgacgccctggtgtctggggcgcccgacgatggaaggaaacacggctcggggagcgtcgtccccagcaaaaccagctttgcacatgccggagccattgtcaatgaccagcgcggcgatctcttcttccattgcgaccggcagagaaacgcgacggcggagcggcggaagaacagagtgcgagagctggcagcggcgactgagacggttacggcagcacttttatttttccttacacaatgacgtgttgctggggcctaatgttctcacataacagtagaaaaccaaaatttgttgtcatctcttcaaagaatcgagaattgcgtacaaaaaaaaccttacataaattaagaatgaatacatttacaggcgtaaatgcaaaccgcttccaactcaaagcaagtaacagcccacggtgttctggccaaagacatcagctaagaaaggaaactgggtcctacggcttggactttccaaccctgacagacccgcaagacaaaacaactggttcttgccagcctctagagaaatcccagaacactcagccctgacacgttaataccctgcacagatcagaggctgctggccacacagactcaccaagccacagacttgtcttccacaagcacgttcttaccttagccacgaagtgaccaagccacacgtactaaaggttgaactcaaagatatgtacagggtattaaacaaataccaaggggaacagttaacttcaatacaaggtcaaaatcagcaacaagttctacaatccagtgctgatatcagatacaagcttcaaggacaatttcttttcgaaggcttattccagtttcgtgaggcta

SEQ ID NO: 988 - DNA, 10091 bp, Homo sapiens
  misc_feature (151)..(151): second gene starts at position 151
atgaagatcgtgcccgatgagcgggatcgtgtgcagaagaaaaccttcaccaagtgggtcaacaagcacctcatcaaggcccagaggcacatcagtgacctgtatgaagacctccgcgatggccacaacctcatctccctgctggaggtcctctcgggggacagcctgccccgggagaaggggaggatgcgtttccacaagctgcagaatgtccagattgccctggactacctccggcaccgccaggtgaagctggtgaacatcaggaatgatgacatcgctgacggcaaccccaagctgacccttggcctcatctggacaatcattctgcacttccagatctcagatatccaggtgagtgggcagtcggaggacatgacggccaaggagaagctgctgctgtggtcgcagcgaatggtggaggggtaccagggcctgcgatgcgacaacttcacctccagctggagagacggccgcctcttcaatgccatcatccaccggcacaagcccctgctcatcgacatgaacaaggtgtaccggcagaccaacctggagaacctggaccaggccttctctgtggcggagcgggacctgggagtgacgcggctcctggaccctgaggacgtggatgtccctcagcccgacgagaagtccatcatcacctacgtctcgtcgctgtatgacgccatgccccgcgtgccggacgtgcaggatggggtgagggccaacgagctgcagctgcgctggcaggagtaccgggagctggtgctgctgctgcttcagtggatgcgacaccacacggccgcctttgaggaacgcaggttcccctccagcttcgaggagattgagatcctgtggtctcagttcctgaagtttaaggagatggagctaccagccaaggaggccgacaagaacaggtccaagggcatctaccaatccctggagggagcggtgcaagcaggccagctcaaggtgccccctggctaccacccgctggatgtggagaaggagtggggcaagctgcacgtggccatcctggagcgggagaagcagctccgcagcgagtttgagaggctggagtgtcttcagcgcatcgtgaccaagctgcagatggaggcggggctgtgtgaggagcagctgaaccaggccgacgccctgctgcagtcggatgtccggctgctggctgcaggcaaagtgccacagcgggcgggggaggtggaacgggacttggacaaggcggatagcatgatccggctgctcttcaacgacgtgcagaccctcaaggatggacggcacccgcagggcgagcagatgtaccgcagggtgtaccgtctgcacgagcgcctggtagccatccgcaccgagtacaacctacggctgaaggcaggcgtggcggcccctgcaacccaggtggcccaggtgactctgcagagtgtgcagaggcgccccgagctggaggactccactctgcgctacctgcaggacctgctggcctgggtggaggagaaccagcaccgtgtggatggcgctgagtggggtgtggacctgcccagcgtggaggcgcagctgggcagccaccgaggcctgcaccagtccatcgaagaattccgggccaagatcgagcgggcacggagtgacgagggccagctctcccccgccacccggggtgcctaccgtgactgcctgggtcggctggacctgcagtacgccaagctgctgaactcctccaaggcccgcctcaggtccctggagagcttgcacagctttgtggcagccgccactaaggagctaatgtggctgaatgagaaggaggaggaggaggtgggcttcgactggagcgaccgcaacaccaacatgaccgccaagaaggagagctactcggcgctgatgcgggagctggagctgaaggagaagaagatcaaggagctccaaaatgctggggaccggctgctgcgggaggaccacccggcccggcccacggtggagtccttccaggcggccctgcagacgcagtggagctggatgctacagctgtgctgctgtatcgaggcacacctgaaggagaacgctgcctactttcagttcttctcagatgtgcgggaggccgaggggcagttgcagaagctgcaggaggcactgcgtaggaaatacagttgtgatcgctccgccaccgtcacccggctggaggacctgctgcaggatgcccaggacgagaaggaacagctgaacgagtacaagggccacctctcaggcctggccaagcgggccaaggccgtcgtgcagctgaagccccgccacccagcccaccccatgcggggccgcctgcccctgctggccgtgtgcgactataagcaggtggaggtgactgtgcacaagggtgacgagtgccagctggtgggccctgcacagccgtcccactggaaggtgctcagcagctccggcagcgaggccgccgtgccctccgtgtgcttcctggtgcccccgcccaaccaggaggcccaggaggccgtcaccaggctggaggcccagcaccaggccctggtcacgctgtggcaccagttgcacgtggacatgaagagccttctggcctggcagagccttcgccgcgacgtgcagctcatccgctcctggtccctggccacgttccgcaccctgaagccagaggagcagcgccaagccctgcacagcctggagctgcactaccaggccttcctgcgggacagccaggacgcgggcggcttcggacccgaggaccggctgatggctgagcgcgagtacggctcctgcagccaccactaccagcagctgctgcagagcctggaacagggtgcacaggaagagtctcgctgccagcgctgcatctccgagctcaaagacatccggctgcagctggaggcctgtgagacgcgcaccgtgcaccgcctgcggctgccgctggacaaagagccggcacgggagtgtgcccagcgcatcgccgagcagcagaaggcacaggcagaggtggaggggctgggcaagggggtcgcccggctctctgccgaggccgagaaggtcttggccctaccagagccatcgcctgcggcccccacgctgcgctcggagctggagctgacgctgggcaagctggagcaggtccgcagcctgtctgccatctacctggagaagctcaagaccatcagcctggtgatccgcggcacgcagggggccgaggaggtgctcagggcccacgaggagcagctcaaggaggcccaggccgtgccggccaccctcccggagctcgaggccaccaaggcctctctgaagaagctgcgggcccaggccgaggcacagcagcccacgttcgacgccctgcgggatgagctgcggggggcacaggaggtgggggagcgactgcagcagcggcacggggagcgggacgtggaggtggagcgctggcgggagcgggtcgcccagttgcttgagcgctggcaggctgtgctggcccagaccgacgtgcggcagcgcgagctcgagcaactgggccgccagctgcgttactaccgcgagagtgcagaccccttgggcgcctggctgcaggacgccaggcggcggcaggagcagatccaggccatgccgctggccgacagccaggctgtgcgggagcagctgcggcaggagcaggccctgctggaggagatcgagcgccacggcgagaaggtcgaggagtgccagaggtttgcgaaacagtacatcaacgccatcaaggactatgaactccagctggtgacgtacaaggcgcagcttgagccggtggcctccccggccaagaagcccaaggtccagtcgggatcagagagtgtcatccaggagtacgtggacctgcgtacgcactacagcgagctgaccacactgacgagccagtacatcaagttcatcagcgagactctgcggcgcatggaggaggaggagaggctggctgagcagcagcgggcagaggagcgcgagcggctggccgaggtggaggccgcgctggagaagcagcggcagctggccgaggcgcacgcccaggcaaaggcacaggcggagcgggaggcgaaggagctgcagcagcgcatgcaggaggaggtggtgcggcgggaggaggcggcggtggacgcgcagcagcagaagcgcagcattcaggaggagctgcagcagctgcggcagagctcggaggcggagatccaggccaaggcccggcaggcagaggcggctgagcgcagccggctgcgcatcgaggaggagatccgcgtggtgcgcctgcagttggaggccaccgagcgccagcgtggcggggctgagggggagctgcaggcactgcgtgcacgggcggaggaggctgaggcacaaaagcgacaggcgcaggaggaggccgagcgcttgcggaggcaggtgcaggacgagagccagcgtaagcggcaggcggaggtggagctggcctcgcgcgtgaaggccgaggccgaggcggcgcgcgagaagcagcgggccctgcaggccctggaggagctgcggctgcaggcggaggaggcggagcggcgcctgcggcaggccgaggtggagcgagcgcggcaggtacaggtggccctggagacggcgcagcgcagtgcagaggcggagctgcagagcaaacgcgcctccttcgccgagaagacggcacagctggagcgctccctgcaggaggaacacgtggctgtggcacagctgcgggaggaggctgagcggcgggcacagcagcaggccgaggccgagcgggcgcgcgaggaggcagagcgggagctggagcgctggcagctcaaggccaacgaggcgctacggctgcggctgcaggcggaggaggtggcgcagcagaagagcctggcgcaggccgaggctgagaagcagaaggaggaggcggagcgcgaggcgcggcggcgcggcaaggcggaggagcaggccgtccggcagcgggagctggctgaacaagagctggagaagcagcggcagctggcggaaggcaccgcgcagcagcgcctggccgcggagcaggagttgatccggctgcgggccgagacggagcagggggagcagcagcggcagctgctggaggaggagctggcccggctgcagcgtgaggcggctgcagccacgcagaaacggcaggagctggaagccgagctggccaaggtgcgggccgagatggaggtgctgctggccagcaaggcgagggctgaggaggagtcgcgctccaccagcgagaagtccaagcagaggctggaggccgaggccggccggttccgcgagctggccgaggaggccgcccgcctgcgtgccctggcggaagaggccaagcggcagcggcagctggccgaggaagacgcggcgcggcagcgggccgaggcggagcgggtgcttgcggagaagctggccgccatcggcgaggccacgcggctcaagacggaggcggagatcgcgctcaaggagaaggaggcggagaacgagcgcctgcggcggctggcggaggacgaggccttccagcggcggcggctggaggagcaggccgcgcaacacaaggctgacatcgaggagcgcctggcccagctgcgcaaggcatcggacagcgagctggagcggcagaaggggctggtggaggacacgctgaggcagcggcggcaggtggaggaggagatcctggcgctgaaggcgagcttcgagaaggcggccgctggcaaggcggagctggagctggagctgggacgcatccgcagcaacgcggaggacacgctgcgcagcaaggagcaggccgagctggaggctgcgaggcagcggcagctggcggcggaggaggagcggcggcgccgtgaggctgaggagcgcgtgcagaagagcctggcggccgaggaggaggccgcacggcagcggaaggcggcgctggaggaagtcgagcggctgaaagccaaggtggaggaggcgcggcgcctgcgggagcgagcggagcaggagtcggcgcggcagctgcagctggcccaggaggccgcccagaagcggctgcaggcggaagagaaggcacacgccttcgcggtgcagcagaaggagcaggagctacagcagacgctgcagcaggagcagagcgtgctggaccagctgcgcggcgagggcggcggcggcggtggcggtggcggtggcggcgacggtggcagcgccatggagccgggggaggtgaaggaccggatcctggagaacatctcgctgtcggtgaagaagttgcagagctattttgctgcatgtgaggatgagatccctgccatccggaaccatgacaaggtcctacagcgtctgtgtgagcacctggaccacgccctgctgtacggactgcaagacctctcctctggctactgggtgctcgtggtgcattttactcggagagaggccatcaagcagatcgaggtgctgcagcacgtggccaccaacctggggcgcagccgtgcctggctgtacctggccctcaacgagaactccttggagagctacctgcggttgttccaggagaacctgggcctgctgcataagtactacgtcaagaatgccctggtctgcagccacgatcacctgacgctcttcctgaccttggtgtccgggctagagttcattcgtttcgagctggatctggatgccccttacctagacctggccccctacatgcccgactactacaaacctcagtacctgctggactttgaagaccgccttcccagctcggtccacggctcagacagtctgtccctcaactctttcaactccgtcacctccaccaacctggagtgggatgacagtgcgattgccccatctagtgaggattatgattttggagatgtgtttccagcagtgccgtctgtacccagcacagactgggaagatggagacctcacagacacggtcagtggtccccgctccacagcctccgacctgaccagcagcaaggcctccaccaggagccccacccagcgccagaaccccttcaacgaggagccggcagagactgtgtcctcctctgacaccacccccgtgcacaccacctctcaggagaaggaggaggcccaggccctggacccgccggatgcctgcacggagctcgaggtcatcagggtcaccaagaagaagaaaattggcaagaagaaaaagagcagatcagatgaggaggcaagtccactccaccccgcctgcagccagaagaaatgtgccaagcagggggacggtgacagccgcaacggcagcccaagccttgggcgggactcgccagacactatgcttgcctccccccaggaggagggagaggggccgagcagcaccacggagagcagcgagcgctccgagccgggcctgctgatccctgagatgaaggacacctccatggagcgcttggggcagcccctgagcaaggttatcgaccagctcaacgggcagctggaccccagcacctggtgctcccgtgctgagcccccagaccagtcctttcggaccggctctcccggggatgccccggagaggccgccgctttgcgactttagtgaggggctttcagccccaatggacttctaccgctttaccgtcgagagtccaagcactgttacatcaggtggcggccaccatgaccctgcagggcttggccaaccgctgcatgttcctagtagccctgaggctgctggccaagaagaagagggaggaggaggagagggacagacgcctcggcccctagaggataccacgagggaggctcaggagctggaggcccagctgtccctggtcagggaggggcctgtgtctgagccagagcctgggacccaggaggttctctgccagctcaagcgagaccagcccagcccgtgtctgagtagcgctgaggattctggggtggatgagggacaggggagcccttcggagatggtccattcctcggagttcagagtagacaacaatcacctgctcctgctcatgatccacgtgttccgagaaaacgaagagcagctgttcaaaatgatccggatgagcaccgggcacatggagggcaacctgcagctgctgtacgtgctgctcacagactgctatgtctacctgctccggaaaggggccacagagaagccatacctggtggaagaggccgtttcttacaatgaacttgactatgtgtcggttggccttgaccagcagacggtgaagctggtgtgcaccaaccgcaggaagcagtttctgctggacacggctgatgtggcgctggctgagttctttttggcttctttgaagtcagccatgatcaaaggctgtcgagaacctccctaccccagcatcctgacggatgccaccatggagaagctggcactggccaaatttgtggcccaagaatcgaagtgtgaggcatctgctgtcaccgtgcgcttctacggccttgtgcactgggaggaccccacagacgagtccctgggccccacgccctgccactgctcaccccccgagggcaccatcaccaaagaaggcatgctgcactacaaggcgggcacctcctacctgggcaaggaacactggaagacgtgcttcgtggtgctcagcaacgggatcctctaccagtacccggaccgcaccgacgtcatccctctgctctcggtgaacatggggggggagcagtgcggtggctgccggagagccaacaccacggatcggccccacgccttccaggtcattctctccgaccggccctgcctggagctaagtgccgagagcgaggccgagatggccgagtggatgcagcatctctgccaggctgtgtccaaaggggtcatcccccagggcgtagctcccagcccctgcataccctgctgcctggtcctcacggatgaccgcctctttacgtgccatgaggattgccagaccagcttcttccgctctttgggcacagccaagctgggcgacatcagcgccgtctccaccgagccgggcaaggagtactgcgtcttggagttctcccaggacagccagcagctcctcccgccctgggtcatctacctgagctgcacttctgaactggaccgattgctgtctgcactgaactctgggtggaaaaccatctatcaggtggacctcccccacacggcgatccaggaagcctccaacaagaagaaattcgaggatgccttgagcctcatccacagcgcctggcagcggagcgacagtctctgccgcggccgagcctcccgagacccctggtgctgaggcagagctggttggcgtccctggtgggcaggaaaggaaggcacgccagccggcaggcacactgtcacggctgttgtcatgctgtcgggagcctacagtccacccctgccctgggcggcagaaccaccgagtgtggcttaagacagggtccctccactccagggatccagatcaggtgcccggcacccctgggcatcctgcccgacaggtagcgaatggaggtcgctgggggcagagggtccgagccctgtgggctctgcggatgcacgccctcctcccgggcctccgcctcagtctgcagaatttctgccgagtggcaccgagaacaccatccatctaaggacgaacaaaagaaccaggagggcgggacccccctcttcctctcctgggttgggggctggggccctgagtgcccagccatccttgttcgtgtttgaacactctcctggccacgtggggaagcgggaacacggggtgtctgcgcatgtttcctcctcctagctccatcactgcgcacacagctgcctgcctcgccagatgcaggggggcgggcagccctccctggctgccaggaggctctgcatgcccacagtcctgccctgcctgtcccctcaacccggcagtgcctgtagcaccgaggagcaaagggggtggatggggggcttggagaagggcggagcccaccagcctggcatccatgttgacatcttctgactgtcccctgcttggctggagccaggcccttccctagagtttcgtcaagagcctcctggggaaggggtcaggtggtttgggttttgttttttaaaataaaatagacatgttatattgcc

SEQ ID NO: 989 - DNA, 10187 bp, Homo sapiens
  misc_feature (247)..(247): second gene starts at position 247
atggagccctcgggcagcctgtttccctccctggtggttgtgggtcacgttgtcaccctggccgctgtgtggcactggcgcaggggacgtcggtgggcgcaggacgagcaagatgagcgggatcgtgtgcagaagaaaaccttcaccaagtgggtcaacaagcacctcatcaaggcccagaggcacatcagtgacctgtatgaagacctccgcgatggccacaacctcatctccctgctggaggtcctctcgggggacagcctgccccgggagaaggggaggatgcgtttccacaagctgcagaatgtccagattgccctggactacctccggcaccgccaggtgaagctggtgaacatcaggaatgatgacatcgctgacggcaaccccaagctgacccttggcctcatctggacaatcattctgcacttccagatctcagatatccaggtgagtgggcagtcggaggacatgacggccaaggagaagctgctgctgtggtcgcagcgaatggtggaggggtaccagggcctgcgatgcgacaacttcacctccagctggagagacggccgcctcttcaatgccatcatccaccggcacaagcccctgctcatcgacatgaacaaggtgtaccggcagaccaacctggagaacctggaccaggccttctctgtggcggagcgggacctgggagtgacgcggctcctggaccctgaggacgtggatgtccctcagcccgacgagaagtccatcatcacctacgtctcgtcgctgtatgacgccatgccccgcgtgccggacgtgcaggatggggtgagggccaacgagctgcagctgcgctggcaggagtaccgggagctggtgctgctgctgcttcagtggatgcgacaccacacggccgcctttgaggaacgcaggttcccctccagcttcgaggagattgagatcctgtggtctcagttcctgaagtttaaggagatggagctaccagccaaggaggccgacaagaacaggtccaagggcatctaccaatccctggagggagcggtgcaagcaggccagctcaaggtgccccctggctaccacccgctggatgtggagaaggagtggggcaagctgcacgtggccatcctggagcgggagaagcagctccgcagcgagtttgagaggctggagtgtcttcagcgcatcgtgaccaagctgcagatggaggcggggctgtgtgaggagcagctgaaccaggccgacgccctgctgcagtcggatgtccggctgctggctgcaggcaaagtgccacagcgggcgggggaggtggaacgggacttggacaaggcggatagcatgatccggctgctcttcaacgacgtgcagaccctcaaggatggacggcacccgcagggcgagcagatgtaccgcagggtgtaccgtctgcacgagcgcctggtagccatccgcaccgagtacaacctacggctgaaggcaggcgtggcggcccctgcaacccaggtggcccaggtgactctgcagagtgtgcagaggcgccccgagctggaggactccactctgcgctacctgcaggacctgctggcctgggtggaggagaaccagcaccgtgtggatggcgctgagtggggtgtggacctgcccagcgtggaggcgcagctgggcagccaccgaggcctgcaccagtccatcgaagaattccgggccaagatcgagcgggcacggagtgacgagggccagctctcccccgccacccggggtgcctaccgtgactgcctgggtcggctggacctgcagtacgccaagctgctgaactcctccaaggcccgcctcaggtccctggagagcttgcacagctttgtggcagccgccactaaggagctaatgtggctgaatgagaaggaggaggaggaggtgggcttcgactggagcgaccgcaacaccaacatgaccgccaagaaggagagctactcggcgctgatgcgggagctggagctgaaggagaagaagatcaaggagctccaaaatgctggggaccggctgctgcgggaggaccacccggcccggcccacggtggagtccttccaggcggccctgcagacgcagtggagctggatgctacagctgtgctgctgtatcgaggcacacctgaaggagaacgctgcctactttcagttcttctcagatgtgcgggaggccgaggggcagttgcagaagctgcaggaggcactgcgtaggaaatacagttgtgatcgctccgccaccgtcacccggctggaggacctgctgcaggatgcccaggacgagaaggaacagctgaacgagtacaagggccacctctcaggcctggccaagcgggccaaggccgtcgtgcagctgaagccccgccacccagcccaccccatgcggggccgcctgcccctgctggccgtgtgcgactataagcaggtggaggtgactgtgcacaagggtgacgagtgccagctggtgggccctgcacagccgtcccactggaaggtgctcagcagctccggcagcgaggccgccgtgccctccgtgtgcttcctggtgcccccgcccaaccaggaggcccaggaggccgtcaccaggctggaggcccagcaccaggccctggtcacgctgtggcaccagttgcacgtggacatgaagagccttctggcctggcagagccttcgccgcgacgtgcagctcatccgctcctggtccctggccacgttccgcaccctgaagccagaggagcagcgccaagccctgcacagcctggagctgcactaccaggccttcctgcgggacagccaggacgcgggcggcttcggacccgaggaccggctgatggctgagcgcgagtacggctcctgcagccaccactaccagcagctgctgcagagcctggaacagggtgcacaggaagagtctcgctgccagcgctgcatctccgagctcaaagacatccggctgcagctggaggcctgtgagacgcgcaccgtgcaccgcctgcggctgccgctggacaaagagccggcacgggagtgtgcccagcgcatcgccgagcagcagaaggcacaggcagaggtggaggggctgggcaagggggtcgcccggctctctgccgaggccgagaaggtcttggccctaccagagccatcgcctgcggcccccacgctgcgctcggagctggagctgacgctgggcaagctggagcaggtccgcagcctgtctgccatctacctggagaagctcaagaccatcagcctggtgatccgcggcacgcagggggccgaggaggtgctcagggcccacgaggagcagctcaaggaggcccaggccgtgccggccaccctcccggagctcgaggccaccaaggcctctctgaagaagctgcgggcccaggccgaggcacagcagcccacgttcgacgccctgcgggatgagctgcggggggcacaggaggtgggggagcgactgcagcagcggcacggggagcgggacgtggaggtggagcgctggcgggagcgggtcgcccagttgcttgagcgctggcaggctgtgctggcccagaccgacgtgcggcagcgcgagctcgagcaactgggccgccagctgcgttactaccgcgagagtgcagaccccttgggcgcctggctgcaggacgccaggcggcggcaggagcagatccaggccatgccgctggccgacagccaggctgtgcgggagcagctgcggcaggagcaggccctgctggaggagatcgagcgccacggcgagaaggtcgaggagtgccagaggtttgcgaaacagtacatcaacgccatcaaggactatgaactccagctggtgacgtacaaggcgcagcttgagccggtggcctccccggccaagaagcccaaggtccagtcgggatcagagagtgtcatccaggagtacgtggacctgcgtacgcactacagcgagctgaccacactgacgagccagtacatcaagttcatcagcgagactctgcggcgcatggaggaggaggagaggctggctgagcagcagcgggcagaggagcgcgagcggctggccgaggtggaggccgcgctggagaagcagcggcagctggccgaggcgcacgcccaggcaaaggcacaggcggagcgggaggcgaaggagctgcagcagcgcatgcaggaggaggtggtgcggcgggaggaggcggcggtggacgcgcagcagcagaagcgcagcattcaggaggagctgcagcagctgcggcagagctcggaggcggagatccaggccaaggcccggcaggcagaggcggctgagcgcagccggctgcgcatcgaggaggagatccgcgtggtgcgcctgcagttggaggccaccgagcgccagcgtggcggggctgagggggagctgcaggcactgcgtgcacgggcggaggaggctgaggcacaaaagcgacaggcgcaggaggaggccgagcgcttgcggaggcaggtgcaggacgagagccagcgtaagcggcaggcggaggtggagctggcctcgcgcgtgaaggccgaggccgaggcggcgcgcgagaagcagcgggccctgcaggccctggaggagctgcggctgcaggcggaggaggcggagcggcgcctgcggcaggccgaggtggagcgagcgcggcaggtacaggtggccctggagacggcgcagcgcagtgcagaggcggagctgcagagcaaacgcgcctccttcgccgagaagacggcacagctggagcgctccctgcaggaggaacacgtggctgtggcacagctgcgggaggaggctgagcggcgggcacagcagcaggccgaggccgagcgggcgcgcgaggaggcagagcgggagctggagcgctggcagctcaaggccaacgaggcgctacggctgcggctgcaggcggaggaggtggcgcagcagaagagcctggcgcaggccgaggctgagaagcagaaggaggaggcggagcgcgaggcgcggcggcgcggcaaggcggaggagcaggccgtccggcagcgggagctggctgaacaagagctggagaagcagcggcagctggcggaaggcaccgcgcagcagcgcctggccgcggagcaggagttgatccggctgcgggccgagacggagcagggggagcagcagcggcagctgctggaggaggagctggcccggctgcagcgtgaggcggctgcagccacgcagaaacggcaggagctggaagccgagctggccaaggtgcgggccgagatggaggtgctgctggccagcaaggcgagggctgaggaggagtcgcgctccaccagcgagaagtccaagcagaggctggaggccgaggccggccggttccgcgagctggccgaggaggccgcccgcctgcgtgccctggcggaagaggccaagcggcagcggcagctggccgaggaagacgcggcgcggcagcgggccgaggcggagcgggtgcttgcggagaagctggccgccatcggcgaggccacgcggctcaagacggaggcggagatcgcgctcaaggagaaggaggcggagaacgagcgcctgcggcggctggcggaggacgaggccttccagcggcggcggctggaggagcaggccgcgcaacacaaggctgacatcgaggagcgcctggcccagctgcgcaaggcatcggacagcgagctggagcggcagaaggggctggtggaggacacgctgaggcagcggcggcaggtggaggaggagatcctggcgctgaaggcgagcttcgagaaggcggccgctggcaaggcggagctggagctggagctgggacgcatccgcagcaacgcggaggacacgctgcgcagcaaggagcaggccgagctggaggctgcgaggcagcggcagctggcggcggaggaggagcggcggcgccgtgaggctgaggagcgcgtgcagaagagcctggcggccgaggaggaggccgcacggcagcggaaggcggcgctggaggaagtcgagcggctgaaagccaaggtggaggaggcgcggcgcctgcgggagcgagcggagcaggagtcggcgcggcagctgcagctggcccaggaggccgcccagaagcggctgcaggcggaagagaaggcacacgccttcgcggtgcagcagaaggagcaggagctacagcagacgctgcagcaggagcagagcgtgctggaccagctgcgcggcgagggcggcggcggcggtggcggtggcggtggcggcgacggtggcagcgccatggagccgggggaggtgaaggaccggatcctggagaacatctcgctgtcggtgaagaagttgcagagctattttgctgcatgtgaggatgagatccctgccatccggaaccatgacaaggtcctacagcgtctgtgtgagcacctggaccacgccctgctgtacggactgcaagacctctcctctggctactgggtgctcgtggtgcattttactcggagagaggccatcaagcagatcgaggtgctgcagcacgtggccaccaacctggggcgcagccgtgcctggctgtacctggccctcaacgagaactccttggagagctacctgcggttgttccaggagaacctgggcctgctgcataagtactacgtcaagaatgccctggtctgcagccacgatcacctgacgctcttcctgaccttggtgtccgggctagagttcattcgtttcgagctggatctggatgccccttacctagacctggccccctacatgcccgactactacaaacctcagtacctgctggactttgaagaccgccttcccagctcggtccacggctcagacagtctgtccctcaactctttcaactccgtcacctccaccaacctggagtgggatgacagtgcgattgccccatctagtgaggattatgattttggagatgtgtttccagcagtgccgtctgtacccagcacagactgggaagatggagacctcacagacacggtcagtggtccccgctccacagcctccgacctgaccagcagcaaggcctccaccaggagccccacccagcgccagaaccccttcaacgaggagccggcagagactgtgtcctcctctgacaccacccccgtgcacaccacctctcaggagaaggaggaggcccaggccctggacccgccggatgcctgcacggagctcgaggtcatcagggtcaccaagaagaagaaaattggcaagaagaaaaagagcagatcagatgaggaggcaagtccactccaccccgcctgcagccagaagaaatgtgccaagcagggggacggtgacagccgcaacggcagcccaagccttgggcgggactcgccagacactatgcttgcctccccccaggaggagggagaggggccgagcagcaccacggagagcagcgagcgctccgagccgggcctgctgatccctgagatgaaggacacctccatggagcgcttggggcagcccctgagcaaggttatcgaccagctcaacgggcagctggaccccagcacctggtgctcccgtgctgagcccccagaccagtcctttcggaccggctctcccggggatgccccggagaggccgccgctttgcgactttagtgaggggctttcagccccaatggacttctaccgctttaccgtcgagagtccaagcactgttacatcaggtggcggccaccatgaccctgcagggcttggccaaccgctgcatgttcctagtagccctgaggctgctggccaagaagaagagggaggaggaggagagggacagacgcctcggcccctagaggataccacgagggaggctcaggagctggaggcccagctgtccctggtcagggaggggcctgtgtctgagccagagcctgggacccaggaggttctctgccagctcaagcgagaccagcccagcccgtgtctgagtagcgctgaggattctggggtggatgagggacaggggagcccttcggagatggtccattcctcggagttcagagtagacaacaatcacctgctcctgctcatgatccacgtgttccgagaaaacgaagagcagctgttcaaaatgatccggatgagcaccgggcacatggagggcaacctgcagctgctgtacgtgctgctcacagactgctatgtctacctgctccggaaaggggccacagagaagccatacctggtggaagaggccgtttcttacaatgaacttgactatgtgtcggttggccttgaccagcagacggtgaagctggtgtgcaccaaccgcaggaagcagtttctgctggacacggctgatgtggcgctggctgagttctttttggcttctttgaagtcagccatgatcaaaggctgtcgagaacctccctaccccagcatcctgacggatgccaccatggagaagctggcactggccaaatttgtggcccaagaatcgaagtgtgaggcatctgctgtcaccgtgcgcttctacggccttgtgcactgggaggaccccacagacgagtccctgggccccacgccctgccactgctcaccccccgagggcaccatcaccaaagaaggcatgctgcactacaaggcgggcacctcctacctgggcaaggaacactggaagacgtgcttcgtggtgctcagcaacgggatcctctaccagtacccggaccgcaccgacgtcatccctctgctctcggtgaacatggggggggagcagtgcggtggctgccggagagccaacaccacggatcggccccacgccttccaggtcattctctccgaccggccctgcctggagctaagtgccgagagcgaggccgagatggccgagtggatgcagcatctctgccaggctgtgtccaaaggggtcatcccccagggcgtagctcccagcccctgcataccctgctgcctggtcctcacggatgaccgcctctttacgtgccatgaggattgccagaccagcttcttccgctctttgggcacagccaagctgggcgacatcagcgccgtctccaccgagccgggcaaggagtactgcgtcttggagttctcccaggacagccagcagctcctcccgccctgggtcatctacctgagctgcacttctgaactggaccgattgctgtctgcactgaactctgggtggaaaaccatctatcaggtggacctcccccacacggcgatccaggaagcctccaacaagaagaaattcgaggatgccttgagcctcatccacagcgcctggcagcggagcgacagtctctgccgcggccgagcctcccgagacccctggtgctgaggcagagctggttggcgtccctggtgggcaggaaaggaaggcacgccagccggcaggcacactgtcacggctgttgtcatgctgtcgggagcctacagtccacccctgccctgggcggcagaaccaccgagtgtggcttaagacagggtccctccactccagggatccagatcaggtgcccggcacccctgggcatcctgcccgacaggtagcgaatggaggtcgctgggggcagagggtccgagccctgtgggctctgcggatgcacgccctcctcccgggcctccgcctcagtctgcagaatttctgccgagtggcaccgagaacaccatccatctaaggacgaacaaaagaaccaggagggcgggacccccctcttcctctcctgggttgggggctggggccctgagtgcccagccatccttgttcgtgtttgaacactctcctggccacgtggggaagcgggaacacggggtgtctgcgcatgtttcctcctcctagctccatcactgcgcacacagctgcctgcctcgccagatgcaggggggcgggcagccctccctggctgccaggaggctctgcatgcccacagtcctgccctgcctgtcccctcaacccggcagtgcctgtagcaccgaggagcaaagggggtggatggggggcttggagaagggcggagcccaccagcctggcatccatgttgacatcttctgactgtcccctgcttggctggagccaggcccttccctagagtttcgtcaagagcctcctggggaaggggtcaggtggtttgggttttgttttttaaaataaaatagacatgttatattgcc

SEQ ID NO: 990 - DNA, 10598 bp, Homo sapiens
  misc_feature (658)..(658): second gene starts at position 658
atggtggccggcatgctcatgccacgggaccagctgcgggccatctatgaggtgctcttccgcgagggcgtgatggtggccaagaaggaccggcggccccgcagcttgcacccccatgtgcccggcgtcaccaacctgcaggtcatgcgtgccatggcgtccctgcgggcacggggcctggtccgcgagacctttgcctggtgccacttttactggtacctcaccaatgaaggcatcgcccacctccgccagtacctgcacctgccgccagagatcgtgcccgcctctctgcagcgcgtgcgccgccccgtcgccatggtgatgcccgcacgccgcaccccccacgtgcaggctgtgcagggtcccctgggctccccacccaagcgggggccgctgccgacggaggagcagcgggtctaccgtcggaaggagcttgaggaggtgtcacctgagacccctgtggtgcctgctaccacccagcggaccctggccaggccaggcccggagcctgccccagccacagatgagcgggatcgtgtgcagaagaaaaccttcaccaagtgggtcaacaagcacctcatcaaggcccagaggcacatcagtgacctgtatgaagacctccgcgatggccacaacctcatctccctgctggaggtcctctcgggggacagcctgccccgggagaaggggaggatgcgtttccacaagctgcagaatgtccagattgccctggactacctccggcaccgccaggtgaagctggtgaacatcaggaatgatgacatcgctgacggcaaccccaagctgacccttggcctcatctggacaatcattctgcacttccagatctcagatatccaggtgagtgggcagtcggaggacatgacggccaaggagaagctgctgctgtggtcgcagcgaatggtggaggggtaccagggcctgcgatgcgacaacttcacctccagctggagagacggccgcctcttcaatgccatcatccaccggcacaagcccctgctcatcgacatgaacaaggtgtaccggcagaccaacctggagaacctggaccaggccttctctgtggcggagcgggacctgggagtgacgcggctcctggaccctgaggacgtggatgtccctcagcccgacgagaagtccatcatcacctacgtctcgtcgctgtatgacgccatgccccgcgtgccggacgtgcaggatggggtgagggccaacgagctgcagctgcgctggcaggagtaccgggagctggtgctgctgctgcttcagtggatgcgacaccacacggccgcctttgaggaacgcaggttcccctccagcttcgaggagattgagatcctgtggtctcagttcctgaagtttaaggagatggagctaccagccaaggaggccgacaagaacaggtccaagggcatctaccaatccctggagggagcggtgcaagcaggccagctcaaggtgccccctggctaccacccgctggatgtggagaaggagtggggcaagctgcacgtggccatcctggagcgggagaagcagctccgcagcgagtttgagaggctggagtgtcttcagcgcatcgtgaccaagctgcagatggaggcggggctgtgtgaggagcagctgaaccaggccgacgccctgctgcagtcggatgtccggctgctggctgcaggcaaagtgccacagcgggcgggggaggtggaacgggacttggacaaggcggatagcatgatccggctgctcttcaacgacgtgcagaccctcaaggatggacggcacccgcagggcgagcagatgtaccgcagggtgtaccgtctgcacgagcgcctggtagccatccgcaccgagtacaacctacggctgaaggcaggcgtggcggcccctgcaacccaggtggcccaggtgactctgcagagtgtgcagaggcgccccgagctggaggactccactctgcgctacctgcaggacctgctggcctgggtggaggagaaccagcaccgtgtggatggcgctgagtggggtgtggacctgcccagcgtggaggcgcagctgggcagccaccgaggcctgcaccagtccatcgaagaattccgggccaagatcgagcgggcacggagtgacgagggccagctctcccccgccacccggggtgcctaccgtgactgcctgggtcggctggacctgcagtacgccaagctgctgaactcctccaaggcccgcctcaggtccctggagagcttgcacagctttgtggcagccgccactaaggagctaatgtggctgaatgagaaggaggaggaggaggtgggcttcgactggagcgaccgcaacaccaacatgaccgccaagaaggagagctactcggcgctgatgcgggagctggagctgaaggagaagaagatcaaggagctccaaaatgctggggaccggctgctgcgggaggaccacccggcccggcccacggtggagtccttccaggcggccctgcagacgcagtggagctggatgctacagctgtgctgctgtatcgaggcacacctgaaggagaacgctgcctactttcagttcttctcagatgtgcgggaggccgaggggcagttgcagaagctgcaggaggcactgcgtaggaaatacagttgtgatcgctccgccaccgtcacccggctggaggacctgctgcaggatgcccaggacgagaaggaacagctgaacgagtacaagggccacctctcaggcctggccaagcgggccaaggccgtcgtgcagctgaagccccgccacccagcccaccccatgcggggccgcctgcccctgctggccgtgtgcgactataagcaggtggaggtgactgtgcacaagggtgacgagtgccagctggtgggccctgcacagccgtcccactggaaggtgctcagcagctccggcagcgaggccgccgtgccctccgtgtgcttcctggtgcccccgcccaaccaggaggcccaggaggccgtcaccaggctggaggcccagcaccaggccctggtcacgctgtggcaccagttgcacgtggacatgaagagccttctggcctggcagagccttcgccgcgacgtgcagctcatccgctcctggtccctggccacgttccgcaccctgaagccagaggagcagcgccaagccctgcacagcctggagctgcactaccaggccttcctgcgggacagccaggacgcgggcggcttcggacccgaggaccggctgatggctgagcgcgagtacggctcctgcagccaccactaccagcagctgctgcagagcctggaacagggtgcacaggaagagtctcgctgccagcgctgcatctccgagctcaaagacatccggctgcagctggaggcctgtgagacgcgcaccgtgcaccgcctgcggctgccgctggacaaagagccggcacgggagtgtgcccagcgcatcgccgagcagcagaaggcacaggcagaggtggaggggctgggcaagggggtcgcccggctctctgccgaggccgagaaggtcttggccctaccagagccatcgcctgcggcccccacgctgcgctcggagctggagctgacgctgggcaagctggagcaggtccgcagcctgtctgccatctacctggagaagctcaagaccatcagcctggtgatccgcggcacgcagggggccgaggaggtgctcagggcccacgaggagcagctcaaggaggcccaggccgtgccggccaccctcccggagctcgaggccaccaaggcctctctgaagaagctgcgggcccaggccgaggcacagcagcccacgttcgacgccctgcgggatgagctgcggggggcacaggaggtgggggagcgactgcagcagcggcacggggagcgggacgtggaggtggagcgctggcgggagcgggtcgcccagttgcttgagcgctggcaggctgtgctggcccagaccgacgtgcggcagcgcgagctcgagcaactgggccgccagctgcgttactaccgcgagagtgcagaccccttgggcgcctggctgcaggacgccaggcggcggcaggagcagatccaggccatgccgctggccgacagccaggctgtgcgggagcagctgcggcaggagcaggccctgctggaggagatcgagcgccacggcgagaaggtcgaggagtgccagaggtttgcgaaacagtacatcaacgccatcaaggactatgaactccagctggtgacgtacaaggcgcagcttgagccggtggcctccccggccaagaagcccaaggtccagtcgggatcagagagtgtcatccaggagtacgtggacctgcgtacgcactacagcgagctgaccacactgacgagccagtacatcaagttcatcagcgagactctgcggcgcatggaggaggaggagaggctggctgagcagcagcgggcagaggagcgcgagcggctggccgaggtggaggccgcgctggagaagcagcggcagctggccgaggcgcacgcccaggcaaaggcacaggcggagcgggaggcgaaggagctgcagcagcgcatgcaggaggaggtggtgcggcgggaggaggcggcggtggacgcgcagcagcagaagcgcagcattcaggaggagctgcagcagctgcggcagagctcggaggcggagatccaggccaaggcccggcaggcagaggcggctgagcgcagccggctgcgcatcgaggaggagatccgcgtggtgcgcctgcagttggaggccaccgagcgccagcgtggcggggctgagggggagctgcaggcactgcgtgcacgggcggaggaggctgaggcacaaaagcgacaggcgcaggaggaggccgagcgcttgcggaggcaggtgcaggacgagagccagcgtaagcggcaggcggaggtggagctggcctcgcgcgtgaaggccgaggccgaggcggcgcgcgagaagcagcgggccctgcaggccctggaggagctgcggctgcaggcggaggaggcggagcggcgcctgcggcaggccgaggtggagcgagcgcggcaggtacaggtggccctggagacggcgcagcgcagtgcagaggcggagctgcagagcaaacgcgcctccttcgccgagaagacggcacagctggagcgctccctgcaggaggaacacgtggctgtggcacagctgcgggaggaggctgagcggcgggcacagcagcaggccgaggccgagcgggcgcgcgaggaggcagagcgggagctggagcgctggcagctcaaggccaacgaggcgctacggctgcggctgcaggcggaggaggtggcgcagcagaagagcctggcgcaggccgaggctgagaagcagaaggaggaggcggagcgcgaggcgcggcggcgcggcaaggcggaggagcaggccgtccggcagcgggagctggctgaacaagagctggagaagcagcggcagctggcggaaggcaccgcgcagcagcgcctggccgcggagcaggagttgatccggctgcgggccgagacggagcagggggagcagcagcggcagctgctggaggaggagctggcccggctgcagcgtgaggcggctgcagccacgcagaaacggcaggagctggaagccgagctggccaaggtgcgggccgagatggaggtgctgctggccagcaaggcgagggctgaggaggagtcgcgctccaccagcgagaagtccaagcagaggctggaggccgaggccggccggttccgcgagctggccgaggaggccgcccgcctgcgtgccctggcggaagaggccaagcggcagcggcagctggccgaggaagacgcggcgcggcagcgggccgaggcggagcgggtgcttgcggagaagctggccgccatcggcgaggccacgcggctcaagacggaggcggagatcgcgctcaaggagaaggaggcggagaacgagcgcctgcggcggctggcggaggacgaggccttccagcggcggcggctggaggagcaggccgcgcaacacaaggctgacatcgaggagcgcctggcccagctgcgcaaggcatcggacagcgagctggagcggcagaaggggctggtggaggacacgctgaggcagcggcggcaggtggaggaggagatcctggcgctgaaggcgagcttcgagaaggcggccgctggcaaggcggagctggagctggagctgggacgcatccgcagcaacgcggaggacacgctgcgcagcaaggagcaggccgagctggaggctgcgaggcagcggcagctggcggcggaggaggagcggcggcgccgtgaggctgaggagcgcgtgcagaagagcctggcggccgaggaggaggccgcacggcagcggaaggcggcgctggaggaagtcgagcggctgaaagccaaggtggaggaggcgcggcgcctgcgggagcgagcggagcaggagtcggcgcggcagctgcagctggcccaggaggccgcccagaagcggctgcaggcggaagagaaggcacacgccttcgcggtgcagcagaaggagcaggagctacagcagacgctgcagcaggagcagagcgtgctggaccagctgcgcggcgagggcggcggcggcggtggcggtggcggtggcggcgacggtggcagcgccatggagccgggggaggtgaaggaccggatcctggagaacatctcgctgtcggtgaagaagttgcagagctattttgctgcatgtgaggatgagatccctgccatccggaaccatgacaaggtcctacagcgtctgtgtgagcacctggaccacgccctgctgtacggactgcaagacctctcctctggctactgggtgctcgtggtgcattttactcggagagaggccatcaagcagatcgaggtgctgcagcacgtggccaccaacctggggcgcagccgtgcctggctgtacctggccctcaacgagaactccttggagagctacctgcggttgttccaggagaacctgggcctgctgcataagtactacgtcaagaatgccctggtctgcagccacgatcacctgacgctcttcctgaccttggtgtccgggctagagttcattcgtttcgagctggatctggatgccccttacctagacctggccccctacatgcccgactactacaaacctcagtacctgctggactttgaagaccgccttcccagctcggtccacggctcagacagtctgtccctcaactctttcaactccgtcacctccaccaacctggagtgggatgacagtgcgattgccccatctagtgaggattatgattttggagatgtgtttccagcagtgccgtctgtacccagcacagactgggaagatggagacctcacagacacggtcagtggtccccgctccacagcctccgacctgaccagcagcaaggcctccaccaggagccccacccagcgccagaaccccttcaacgaggagccggcagagactgtgtcctcctctgacaccacccccgtgcacaccacctctcaggagaaggaggaggcccaggccctggacccgccggatgcctgcacggagctcgaggtcatcagggtcaccaagaagaagaaaattggcaagaagaaaaagagcagatcagatgaggaggcaagtccactccaccccgcctgcagccagaagaaatgtgccaagcagggggacggtgacagccgcaacggcagcccaagccttgggcgggactcgccagacactatgcttgcctccccccaggaggagggagaggggccgagcagcaccacggagagcagcgagcgctccgagccgggcctgctgatccctgagatgaaggacacctccatggagcgcttggggcagcccctgagcaaggttatcgaccagctcaacgggcagctggaccccagcacctggtgctcccgtgctgagcccccagaccagtcctttcggaccggctctcccggggatgccccggagaggccgccgctttgcgactttagtgaggggctttcagccccaatggacttctaccgctttaccgtcgagagtccaagcactgttacatcaggtggcggccaccatgaccctgcagggcttggccaaccgctgcatgttcctagtagccctgaggctgctggccaagaagaagagggaggaggaggagagggacagacgcctcggcccctagaggataccacgagggaggctcaggagctggaggcccagctgtccctggtcagggaggggcctgtgtctgagccagagcctgggacccaggaggttctctgccagctcaagcgagaccagcccagcccgtgtctgagtagcgctgaggattctggggtggatgagggacaggggagcccttcggagatggtccattcctcggagttcagagtagacaacaatcacctgctcctgctcatgatccacgtgttccgagaaaacgaagagcagctgttcaaaatgatccggatgagcaccgggcacatggagggcaacctgcagctgctgtacgtgctgctcacagactgctatgtctacctgctccggaaaggggccacagagaagccatacctggtggaagaggccgtttcttacaatgaacttgactatgtgtcggttggccttgaccagcagacggtgaagctggtgtgcaccaaccgcaggaagcagtttctgctggacacggctgatgtggcgctggctgagttctttttggcttctttgaagtcagccatgatcaaaggctgtcgagaacctccctaccccagcatcctgacggatgccaccatggagaagctggcactggccaaatttgtggcccaagaatcgaagtgtgaggcatctgctgtcaccgtgcgcttctacggccttgtgcactgggaggaccccacagacgagtccctgggccccacgccctgccactgctcaccccccgagggcaccatcaccaaagaaggcatgctgcactacaaggcgggcacctcctacctgggcaaggaacactggaagacgtgcttcgtggtgctcagcaacgggatcctctaccagtacccggaccgcaccgacgtcatccctctgctctcggtgaacatggggggggagcagtgcggtggctgccggagagccaacaccacggatcggccccacgccttccaggtcattctctccgaccggccctgcctggagctaagtgccgagagcgaggccgagatggccgagtggatgcagcatctctgccaggctgtgtccaaaggggtcatcccccagggcgtagctcccagcccctgcataccctgctgcctggtcctcacggatgaccgcctctttacgtgccatgaggattgccagaccagcttcttccgctctttgggcacagccaagctgggcgacatcagcgccgtctccaccgagccgggcaaggagtactgcgtcttggagttctcccaggacagccagcagctcctcccgccctgggtcatctacctgagctgcacttctgaactggaccgattgctgtctgcactgaactctgggtggaaaaccatctatcaggtggacctcccccacacggcgatccaggaagcctccaacaagaagaaattcgaggatgccttgagcctcatccacagcgcctggcagcggagcgacagtctctgccgcggccgagcctcccgagacccctggtgctgaggcagagctggttggcgtccctggtgggcaggaaaggaaggcacgccagccggcaggcacactgtcacggctgttgtcatgctgtcgggagcctacagtccacccctgccctgggcggcagaaccaccgagtgtggcttaagacagggtccctccactccagggatccagatcaggtgcccggcacccctgggcatcctgcccgacaggtagcgaatggaggtcgctgggggcagagggtccgagccctgtgggctctgcggatgcacgccctcctcccgggcctccgcctcagtctgcagaatttctgccgagtggcaccgagaacaccatccatctaaggacgaacaaaagaaccaggagggcgggacccccctcttcctctcctgggttgggggctggggccctgagtgcccagccatccttgttcgtgtttgaacactctcctggccacgtggggaagcgggaacacggggtgtctgcgcatgtttcctcctcctagctccatcactgcgcacacagctgcctgcctcgccagatgcaggggggcgggcagccctccctggctgccaggaggctctgcatgcccacagtcctgccctgcctgtcccctcaacccggcagtgcctgtagcaccgaggagcaaagggggtggatggggggcttggagaagggcggagcccaccagcctggcatccatgttgacatcttctgactgtcccctgcttggctggagccaggcccttccctagagtttcgtcaagagcctcctggggaaggggtcaggtggtttgggttttgttttttaaaataaaatagacatgttatattgcc

SEQ ID NO: 991 - DNA, 10145 bp, Homo sapiens
  misc_feature (205)..(205): second gene starts at position 205
atggccggcccgctgcccgacgagcaggacttcatccaggcctacgaggaggtgcgcgagaagtacaaagatgagcgggatcgtgtgcagaagaaaaccttcaccaagtgggtcaacaagcacctcatcaaggcccagaggcacatcagtgacctgtatgaagacctccgcgatggccacaacctcatctccctgctggaggtcctctcgggggacagcctgccccgggagaaggggaggatgcgtttccacaagctgcagaatgtccagattgccctggactacctccggcaccgccaggtgaagctggtgaacatcaggaatgatgacatcgctgacggcaaccccaagctgacccttggcctcatctggacaatcattctgcacttccagatctcagatatccaggtgagtgggcagtcggaggacatgacggccaaggagaagctgctgctgtggtcgcagcgaatggtggaggggtaccagggcctgcgatgcgacaacttcacctccagctggagagacggccgcctcttcaatgccatcatccaccggcacaagcccctgctcatcgacatgaacaaggtgtaccggcagaccaacctggagaacctggaccaggccttctctgtggcggagcgggacctgggagtgacgcggctcctggaccctgaggacgtggatgtccctcagcccgacgagaagtccatcatcacctacgtctcgtcgctgtatgacgccatgccccgcgtgccggacgtgcaggatggggtgagggccaacgagctgcagctgcgctggcaggagtaccgggagctggtgctgctgctgcttcagtggatgcgacaccacacggccgcctttgaggaacgcaggttcccctccagcttcgaggagattgagatcctgtggtctcagttcctgaagtttaaggagatggagctaccagccaaggaggccgacaagaacaggtccaagggcatctaccaatccctggagggagcggtgcaagcaggccagctcaaggtgccccctggctaccacccgctggatgtggagaaggagtggggcaagctgcacgtggccatcctggagcgggagaagcagctccgcagcgagtttgagaggctggagtgtcttcagcgcatcgtgaccaagctgcagatggaggcggggctgtgtgaggagcagctgaaccaggccgacgccctgctgcagtcggatgtccggctgctggctgcaggcaaagtgccacagcgggcgggggaggtggaacgggacttggacaaggcggatagcatgatccggctgctcttcaacgacgtgcagaccctcaaggatggacggcacccgcagggcgagcagatgtaccgcagggtgtaccgtctgcacgagcgcctggtagccatccgcaccgagtacaacctacggctgaaggcaggcgtggcggcccctgcaacccaggtggcccaggtgactctgcagagtgtgcagaggcgccccgagctggaggactccactctgcgctacctgcaggacctgctggcctgggtggaggagaaccagcaccgtgtggatggcgctgagtggggtgtggacctgcccagcgtggaggcgcagctgggcagccaccgaggcctgcaccagtccatcgaagaattccgggccaagatcgagcgggcacggagtgacgagggccagctctcccccgccacccggggtgcctaccgtgactgcctgggtcggctggacctgcagtacgccaagctgctgaactcctccaaggcccgcctcaggtccctggagagcttgcacagctttgtggcagccgccactaaggagctaatgtggctgaatgagaaggaggaggaggaggtgggcttcgactggagcgaccgcaacaccaacatgaccgccaagaaggagagctactcggcgctgatgcgggagctggagctgaaggagaagaagatcaaggagctccaaaatgctggggaccggctgctgcgggaggaccacccggcccggcccacggtggagtccttccaggcggccctgcagacgcagtggagctggatgctacagctgtgctgctgtatcgaggcacacctgaaggagaacgctgcctactttcagttcttctcagatgtgcgggaggccgaggggcagttgcagaagctgcaggaggcactgcgtaggaaatacagttgtgatcgctccgccaccgtcacccggctggaggacctgctgcaggatgcccaggacgagaaggaacagctgaacgagtacaagggccacctctcaggcctggccaagcgggccaaggccgtcgtgcagctgaagccccgccacccagcccaccccatgcggggccgcctgcccctgctggccgtgtgcgactataagcaggtggaggtgactgtgcacaagggtgacgagtgccagctggtgggccctgcacagccgtcccactggaaggtgctcagcagctccggcagcgaggccgccgtgccctccgtgtgcttcctggtgcccccgcccaaccaggaggcccaggaggccgtcaccaggctggaggcccagcaccaggccctggtcacgctgtggcaccagttgcacgtggacatgaagagccttctggcctggcagagccttcgccgcgacgtgcagctcatccgctcctggtccctggccacgttccgcaccctgaagccagaggagcagcgccaagccctgcacagcctggagctgcactaccaggccttcctgcgggacagccaggacgcgggcggcttcggacccgaggaccggctgatggctgagcgcgagtacggctcctgcagccaccactaccagcagctgctgcagagcctggaacagggtgcacaggaagagtctcgctgccagcgctgcatctccgagctcaaagacatccggctgcagctggaggcctgtgagacgcgcaccgtgcaccgcctgcggctgccgctggacaaagagccggcacgggagtgtgcccagcgcatcgccgagcagcagaaggcacaggcagaggtggaggggctgggcaagggggtcgcccggctctctgccgaggccgagaaggtcttggccctaccagagccatcgcctgcggcccccacgctgcgctcggagctggagctgacgctgggcaagctggagcaggtccgcagcctgtctgccatctacctggagaagctcaagaccatcagcctggtgatccgcggcacgcagggggccgaggaggtgctcagggcccacgaggagcagctcaaggaggcccaggccgtgccggccaccctcccggagctcgaggccaccaaggcctctctgaagaagctgcgggcccaggccgaggcacagcagcccacgttcgacgccctgcgggatgagctgcggggggcacaggaggtgggggagcgactgcagcagcggcacggggagcgggacgtggaggtggagcgctggcgggagcgggtcgcccagttgcttgagcgctggcaggctgtgctggcccagaccgacgtgcggcagcgcgagctcgagcaactgggccgccagctgcgttactaccgcgagagtgcagaccccttgggcgcctggctgcaggacgccaggcggcggcaggagcagatccaggccatgccgctggccgacagccaggctgtgcgggagcagctgcggcaggagcaggccctgctggaggagatcgagcgccacggcgagaaggtcgaggagtgccagaggtttgcgaaacagtacatcaacgccatcaaggactatgaactccagctggtgacgtacaaggcgcagcttgagccggtggcctccccggccaagaagcccaaggtccagtcgggatcagagagtgtcatccaggagtacgtggacctgcgtacgcactacagcgagctgaccacactgacgagccagtacatcaagttcatcagcgagactctgcggcgcatggaggaggaggagaggctggctgagcagcagcgggcagaggagcgcgagcggctggccgaggtggaggccgcgctggagaagcagcggcagctggccgaggcgcacgcccaggcaaaggcacaggcggagcgggaggcgaaggagctgcagcagcgcatgcaggaggaggtggtgcggcgggaggaggcggcggtggacgcgcagcagcagaagcgcagcattcaggaggagctgcagcagctgcggcagagctcggaggcggagatccaggccaaggcccggcaggcagaggcggctgagcgcagccggctgcgcatcgaggaggagatccgcgtggtgcgcctgcagttggaggccaccgagcgccagcgtggcggggctgagggggagctgcaggcactgcgtgcacgggcggaggaggctgaggcacaaaagcgacaggcgcaggaggaggccgagcgcttgcggaggcaggtgcaggacgagagccagcgtaagcggcaggcggaggtggagctggcctcgcgcgtgaaggccgaggccgaggcggcgcgcgagaagcagcgggccctgcaggccctggaggagctgcggctgcaggcggaggaggcggagcggcgcctgcggcaggccgaggtggagcgagcgcggcaggtacaggtggccctggagacggcgcagcgcagtgcagaggcggagctgcagagcaaacgcgcctccttcgccgagaagacggcacagctggagcgctccctgcaggaggaacacgtggctgtggcacagctgcgggaggaggctgagcggcgggcacagcagcaggccgaggccgagcgggcgcgcgaggaggcagagcgggagctggagcgctggcagctcaaggccaacgaggcgctacggctgcggctgcaggcggaggaggtggcgcagcagaagagcctggcgcaggccgaggctgagaagcagaaggaggaggcggagcgcgaggcgcggcggcgcggcaaggcggaggagcaggccgtccggcagcgggagctggctgaacaagagctggagaagcagcggcagctggcggaaggcaccgcgcagcagcgcctggccgcggagcaggagttgatccggctgcgggccgagacggagcagggggagcagcagcggcagctgctggaggaggagctggcccggctgcagcgtgaggcggctgcagccacgcagaaacggcaggagctggaagccgagctggccaaggtgcgggccgagatggaggtgctgctggccagcaaggcgagggctgaggaggagtcgcgctccaccagcgagaagtccaagcagaggctggaggccgaggccggccggttccgcgagctggccgaggaggccgcccgcctgcgtgccctggcggaagaggccaagcggcagcggcagctggccgaggaagacgcggcgcggcagcgggccgaggcggagcgggtgcttgcggagaagctggccgccatcggcgaggccacgcggctcaagacggaggcggagatcgcgctcaaggagaaggaggcggagaacgagcgcctgcggcggctggcggaggacgaggccttccagcggcggcggctggaggagcaggccgcgcaacacaaggctgacatcgaggagcgcctggcccagctgcgcaaggcatcggacagcgagctggagcggcagaaggggctggtggaggacacgctgaggcagcggcggcaggtggaggaggagatcctggcgctgaaggcgagcttcgagaaggcggccgctggcaaggcggagctggagctggagctgggacgcatccgcagcaacgcggaggacacgctgcgcagcaaggagcaggccgagctggaggctgcgaggcagcggcagctggcggcggaggaggagcggcggcgccgtgaggctgaggagcgcgtgcagaagagcctggcggccgaggaggaggccgcacggcagcggaaggcggcgctggaggaagtcgagcggctgaaagccaaggtggaggaggcgcggcgcctgcgggagcgagcggagcaggagtcggcgcggcagctgcagctggcccaggaggccgcccagaagcggctgcaggcggaagagaaggcacacgccttcgcggtgcagcagaaggagcaggagctacagcagacgctgcagcaggagcagagcgtgctggaccagctgcgcggcgagggcggcggcggcggtggcggtggcggtggcggcgacggtggcagcgccatggagccgggggaggtgaaggaccggatcctggagaacatctcgctgtcggtgaagaagttgcagagctattttgctgcatgtgaggatgagatccctgccatccggaaccatgacaaggtcctacagcgtctgtgtgagcacctggaccacgccctgctgtacggactgcaagacctctcctctggctactgggtgctcgtggtgcattttactcggagagaggccatcaagcagatcgaggtgctgcagcacgtggccaccaacctggggcgcagccgtgcctggctgtacctggccctcaacgagaactccttggagagctacctgcggttgttccaggagaacctgggcctgctgcataagtactacgtcaagaatgccctggtctgcagccacgatcacctgacgctcttcctgaccttggtgtccgggctagagttcattcgtttcgagctggatctggatgccccttacctagacctggccccctacatgcccgactactacaaacctcagtacctgctggactttgaagaccgccttcccagctcggtccacggctcagacagtctgtccctcaactctttcaactccgtcacctccaccaacctggagtgggatgacagtgcgattgccccatctagtgaggattatgattttggagatgtgtttccagcagtgccgtctgtacccagcacagactgggaagatggagacctcacagacacggtcagtggtccccgctccacagcctccgacctgaccagcagcaaggcctccaccaggagccccacccagcgccagaaccccttcaacgaggagccggcagagactgtgtcctcctctgacaccacccccgtgcacaccacctctcaggagaaggaggaggcccaggccctggacccgccggatgcctgcacggagctcgaggtcatcagggtcaccaagaagaagaaaattggcaagaagaaaaagagcagatcagatgaggaggcaagtccactccaccccgcctgcagccagaagaaatgtgccaagcagggggacggtgacagccgcaacggcagcccaagccttgggcgggactcgccagacactatgcttgcctccccccaggaggagggagaggggccgagcagcaccacggagagcagcgagcgctccgagccgggcctgctgatccctgagatgaaggacacctccatggagcgcttggggcagcccctgagcaaggttatcgaccagctcaacgggcagctggaccccagcacctggtgctcccgtgctgagcccccagaccagtcctttcggaccggctctcccggggatgccccggagaggccgccgctttgcgactttagtgaggggctttcagccccaatggacttctaccgctttaccgtcgagagtccaagcactgttacatcaggtggcggccaccatgaccctgcagggcttggccaaccgctgcatgttcctagtagccctgaggctgctggccaagaagaagagggaggaggaggagagggacagacgcctcggcccctagaggataccacgagggaggctcaggagctggaggcccagctgtccctggtcagggaggggcctgtgtctgagccagagcctgggacccaggaggttctctgccagctcaagcgagaccagcccagcccgtgtctgagtagcgctgaggattctggggtggatgagggacaggggagcccttcggagatggtccattcctcggagttcagagtagacaacaatcacctgctcctgctcatgatccacgtgttccgagaaaacgaagagcagctgttcaaaatgatccggatgagcaccgggcacatggagggcaacctgcagctgctgtacgtgctgctcacagactgctatgtctacctgctccggaaaggggccacagagaagccatacctggtggaagaggccgtttcttacaatgaacttgactatgtgtcggttggccttgaccagcagacggtgaagctggtgtgcaccaaccgcaggaagcagtttctgctggacacggctgatgtggcgctggctgagttctttttggcttctttgaagtcagccatgatcaaaggctgtcgagaacctccctaccccagcatcctgacggatgccaccatggagaagctggcactggccaaatttgtggcccaagaatcgaagtgtgaggcatctgctgtcaccgtgcgcttctacggccttgtgcactgggaggaccccacagacgagtccctgggccccacgccctgccactgctcaccccccgagggcaccatcaccaaagaaggcatgctgcactacaaggcgggcacctcctacctgggcaaggaacactggaagacgtgcttcgtggtgctcagcaacgggatcctctaccagtacccggaccgcaccgacgtcatccctctgctctcggtgaacatggggggggagcagtgcggtggctgccggagagccaacaccacggatcggccccacgccttccaggtcattctctccgaccggccctgcctggagctaagtgccgagagcgaggccgagatggccgagtggatgcagcatctctgccaggctgtgtccaaaggggtcatcccccagggcgtagctcccagcccctgcataccctgctgcctggtcctcacggatgaccgcctctttacgtgccatgaggattgccagaccagcttcttccgctctttgggcacagccaagctgggcgacatcagcgccgtctccaccgagccgggcaaggagtactgcgtcttggagttctcccaggacagccagcagctcctcccgccctgggtcatctacctgagctgcacttctgaactggaccgattgctgtctgcactgaactctgggtggaaaaccatctatcaggtggacctcccccacacggcgatccaggaagcctccaacaagaagaaattcgaggatgccttgagcctcatccacagcgcctggcagcggagcgacagtctctgccgcggccgagcctcccgagacccctggtgctgaggcagagctggttggcgtccctggtgggcaggaaaggaaggcacgccagccggcaggcacactgtcacggctgttgtcatgctgtcgggagcctacagtccacccctgccctgggcggcagaaccaccgagtgtggcttaagacagggtccctccactccagggatccagatcaggtgcccggcacccctgggcatcctgcccgacaggtagcgaatggaggtcgctgggggcagagggtccgagccctgtgggctctgcggatgcacgccctcctcccgggcctccgcctcagtctgcagaatttctgccgagtggcaccgagaacaccatccatctaaggacgaacaaaagaaccaggagggcgggacccccctcttcctctcctgggttgggggctggggccctgagtgcccagccatccttgttcgtgtttgaacactctcctggccacgtggggaagcgggaacacggggtgtctgcgcatgtttcctcctcctagctccatcactgcgcacacagctgcctgcctcgccagatgcaggggggcgggcagccctccctggctgccaggaggctctgcatgcccacagtcctgccctgcctgtcccctcaacccggcagtgcctgtagcaccgaggagcaaagggggtggatggggggcttggagaagggcggagcccaccagcctggcatccatgttgacatcttctgactgtcccctgcttggctggagccaggcccttccctagagtttcgtcaagagcctcctggggaaggggtcaggtggtttgggttttgttttttaaaataaaatagacatgttatattgcc

SEQ ID NO: 992 - DNA, 10121 bp, Homo sapiens
  misc_feature (181)..(181): second gene starts at position 181
atggacccctcgcgagccatccagaacgagatcagctccctcaaagatgagcgggatcgtgtgcagaagaaaaccttcaccaagtgggtcaacaagcacctcatcaaggcccagaggcacatcagtgacctgtatgaagacctccgcgatggccacaacctcatctccctgctggaggtcctctcgggggacagcctgccccgggagaaggggaggatgcgtttccacaagctgcagaatgtccagattgccctggactacctccggcaccgccaggtgaagctggtgaacatcaggaatgatgacatcgctgacggcaaccccaagctgacccttggcctcatctggacaatcattctgcacttccagatctcagatatccaggtgagtgggcagtcggaggacatgacggccaaggagaagctgctgctgtggtcgcagcgaatggtggaggggtaccagggcctgcgatgcgacaacttcacctccagctggagagacggccgcctcttcaatgccatcatccaccggcacaagcccctgctcatcgacatgaacaaggtgtaccggcagaccaacctggagaacctggaccaggccttctctgtggcggagcgggacctgggagtgacgcggctcctggaccctgaggacgtggatgtccctcagcccgacgagaagtccatcatcacctacgtctcgtcgctgtatgacgccatgccccgcgtgccggacgtgcaggatggggtgagggccaacgagctgcagctgcgctggcaggagtaccgggagctggtgctgctgctgcttcagtggatgcgacaccacacggccgcctttgaggaacgcaggttcccctccagcttcgaggagattgagatcctgtggtctcagttcctgaagtttaaggagatggagctaccagccaaggaggccgacaagaacaggtccaagggcatctaccaatccctggagggagcggtgcaagcaggccagctcaaggtgccccctggctaccacccgctggatgtggagaaggagtggggcaagctgcacgtggccatcctggagcgggagaagcagctccgcagcgagtttgagaggctggagtgtcttcagcgcatcgtgaccaagctgcagatggaggcggggctgtgtgaggagcagctgaaccaggccgacgccctgctgcagtcggatgtccggctgctggctgcaggcaaagtgccacagcgggcgggggaggtggaacgggacttggacaaggcggatagcatgatccggctgctcttcaacgacgtgcagaccctcaaggatggacggcacccgcagggcgagcagatgtaccgcagggtgtaccgtctgcacgagcgcctggtagccatccgcaccgagtacaacctacggctgaaggcaggcgtggcggcccctgcaacccaggtggcccaggtgactctgcagagtgtgcagaggcgccccgagctggaggactccactctgcgctacctgcaggacctgctggcctgggtggaggagaaccagcaccgtgtggatggcgctgagtggggtgtggacctgcccagcgtggaggcgcagctgggcagccaccgaggcctgcaccagtccatcgaagaattccgggccaagatcgagcgggcacggagtgacgagggccagctctcccccgccacccggggtgcctaccgtgactgcctgggtcggctggacctgcagtacgccaagctgctgaactcctccaaggcccgcctcaggtccctggagagcttgcacagctttgtggcagccgccactaaggagctaatgtggctgaatgagaaggaggaggaggaggtgggcttcgactggagcgaccgcaacaccaacatgaccgccaagaaggagagctactcggcgctgatgcgggagctggagctgaaggagaagaagatcaaggagctccaaaatgctggggaccggctgctgcgggaggaccacccggcccggcccacggtggagtccttccaggcggccctgcagacgcagtggagctggatgctacagctgtgctgctgtatcgaggcacacctgaaggagaacgctgcctactttcagttcttctcagatgtgcgggaggccgaggggcagttgcagaagctgcaggaggcactgcgtaggaaatacagttgtgatcgctccgccaccgtcacccggctggaggacctgctgcaggatgcccaggacgagaaggaacagctgaacgagtacaagggccacctctcaggcctggccaagcgggccaaggccgtcgtgcagctgaagccccgccacccagcccaccccatgcggggccgcctgcccctgctggccgtgtgcgactataagcaggtggaggtgactgtgcacaagggtgacgagtgccagctggtgggccctgcacagccgtcccactggaaggtgctcagcagctccggcagcgaggccgccgtgccctccgtgtgcttcctggtgcccccgcccaaccaggaggcccaggaggccgtcaccaggctggaggcccagcaccaggccctggtcacgctgtggcaccagttgcacgtggacatgaagagccttctggcctggcagagccttcgccgcgacgtgcagctcatccgctcctggtccctggccacgttccgcaccctgaagccagaggagcagcgccaagccctgcacagcctggagctgcactaccaggccttcctgcgggacagccaggacgcgggcggcttcggacccgaggaccggctgatggctgagcgcgagtacggctcctgcagccaccactaccagcagctgctgcagagcctggaacagggtgcacaggaagagtctcgctgccagcgctgcatctccgagctcaaagacatccggctgcagctggaggcctgtgagacgcgcaccgtgcaccgcctgcggctgccgctggacaaagagccggcacgggagtgtgcccagcgcatcgccgagcagcagaaggcacaggcagaggtggaggggctgggcaagggggtcgcccggctctctgccgaggccgagaaggtcttggccctaccagagccatcgcctgcggcccccacgctgcgctcggagctggagctgacgctgggcaagctggagcaggtccgcagcctgtctgccatctacctggagaagctcaagaccatcagcctggtgatccgcggcacgcagggggccgaggaggtgctcagggcccacgaggagcagctcaaggaggcccaggccgtgccggccaccctcccggagctcgaggccaccaaggcctctctgaagaagctgcgggcccaggccgaggcacagcagcccacgttcgacgccctgcgggatgagctgcggggggcacaggaggtgggggagcgactgcagcagcggcacggggagcgggacgtggaggtggagcgctggcgggagcgggtcgcccagttgcttgagcgctggcaggctgtgctggcccagaccgacgtgcggcagcgcgagctcgagcaactgggccgccagctgcgttactaccgcgagagtgcagaccccttgggcgcctggctgcaggacgccaggcggcggcaggagcagatccaggccatgccgctggccgacagccaggctgtgcgggagcagctgcggcaggagcaggccctgctggaggagatcgagcgccacggcgagaaggtcgaggagtgccagaggtttgcgaaacagtacatcaacgccatcaaggactatgaactccagctggtgacgtacaaggcgcagcttgagccggtggcctccccggccaagaagcccaaggtccagtcgggatcagagagtgtcatccaggagtacgtggacctgcgtacgcactacagcgagctgaccacactgacgagccagtacatcaagttcatcagcgagactctgcggcgcatggaggaggaggagaggctggctgagcagcagcgggcagaggagcgcgagcggctggccgaggtggaggccgcgctggagaagcagcggcagctggccgaggcgcacgcccaggcaaaggcacaggcggagcgggaggcgaaggagctgcagcagcgcatgcaggaggaggtggtgcggcgggaggaggcggcggtggacgcgcagcagcagaagcgcagcattcaggaggagctgcagcagctgcggcagagctcggaggcggagatccaggccaaggcccggcaggcagaggcggctgagcgcagccggctgcgcatcgaggaggagatccgcgtggtgcgcctgcagttggaggccaccgagcgccagcgtggcggggctgagggggagctgcaggcactgcgtgcacgggcggaggaggctgaggcacaaaagcgacaggcgcaggaggaggccgagcgcttgcggaggcaggtgcaggacgagagccagcgtaagcggcaggcggaggtggagctggcctcgcgcgtgaaggccgaggccgaggcggcgcgcgagaagcagcgggccctgcaggccctggaggagctgcggctgcaggcggaggaggcggagcggcgcctgcggcaggccgaggtggagcgagcgcggcaggtacaggtggccctggagacggcgcagcgcagtgcagaggcggagctgcagagcaaacgcgcctccttcgccgagaagacggcacagctggagcgctccctgcaggaggaacacgtggctgtggcacagctgcgggaggaggctgagcggcgggcacagcagcaggccgaggccgagcgggcgcgcgaggaggcagagcgggagctggagcgctggcagctcaaggccaacgaggcgctacggctgcggctgcaggcggaggaggtggcgcagcagaagagcctggcgcaggccgaggctgagaagcagaaggaggaggcggagcgcgaggcgcggcggcgcggcaaggcggaggagcaggccgtccggcagcgggagctggctgaacaagagctggagaagcagcggcagctggcggaaggcaccgcgcagcagcgcctggccgcggagcaggagttgatccggctgcgggccgagacggagcagggggagcagcagcggcagctgctggaggaggagctggcccggctgcagcgtgaggcggctgcagccacgcagaaacggcaggagctggaagccgagctggccaaggtgcgggccgagatggaggtgctgctggccagcaaggcgagggctgaggaggagtcgcgctccaccagcgagaagtccaagcagaggctggaggccgaggccggccggttccgcgagctggccgaggaggccgcccgcctgcgtgccctggcggaagaggccaagcggcagcggcagctggccgaggaagacgcggcgcggcagcgggccgaggcggagcgggtgcttgcggagaagctggccgccatcggcgaggccacgcggctcaagacggaggcggagatcgcgctcaaggagaaggaggcggagaacgagcgcctgcggcggctggcggaggacgaggccttccagcggcggcggctggaggagcaggccgcgcaacacaaggctgacatcgaggagcgcctggcccagctgcgcaaggcatcggacagcgagctggagcggcagaaggggctggtggaggacacgctgaggcagcggcggcaggtggaggaggagatcctggcgctgaaggcgagcttcgagaaggcggccgctggcaaggcggagctggagctggagctgggacgcatccgcagcaacgcggaggacacgctgcgcagcaaggagcaggccgagctggaggctgcgaggcagcggcagctggcggcggaggaggagcggcggcgccgtgaggctgaggagcgcgtgcagaagagcctggcggccgaggaggaggccgcacggcagcggaaggcggcgctggaggaagtcgagcggctgaaagccaaggtggaggaggcgcggcgcctgcgggagcgagcggagcaggagtcggcgcggcagctgcagctggcccaggaggccgcccagaagcggctgcaggcggaagagaaggcacacgccttcgcggtgcagcagaaggagcaggagctacagcagacgctgcagcaggagcagagcgtgctggaccagctgcgcggcgagggcggcggcggcggtggcggtggcggtggcggcgacggtggcagcgccatggagccgggggaggtgaaggaccggatcctggagaacatctcgctgtcggtgaagaagttgcagagctattttgctgcatgtgaggatgagatccctgccatccggaaccatgacaaggtcctacagcgtctgtgtgagcacctggaccacgccctgctgtacggactgcaagacctctcctctggctactgggtgctcgtggtgcattttactcggagagaggccatcaagcagatcgaggtgctgcagcacgtggccaccaacctggggcgcagccgtgcctggctgtacctggccctcaacgagaactccttggagagctacctgcggttgttccaggagaacctgggcctgctgcataagtactacgtcaagaatgccctggtctgcagccacgatcacctgacgctcttcctgaccttggtgtccgggctagagttcattcgtttcgagctggatctggatgccccttacctagacctggccccctacatgcccgactactacaaacctcagtacctgctggactttgaagaccgccttcccagctcggtccacggctcagacagtctgtccctcaactctttcaactccgtcacctccaccaacctggagtgggatgacagtgcgattgccccatctagtgaggattatgattttggagatgtgtttccagcagtgccgtctgtacccagcacagactgggaagatggagacctcacagacacggtcagtggtccccgctccacagcctccgacctgaccagcagcaaggcctccaccaggagccccacccagcgccagaaccccttcaacgaggagccggcagagactgtgtcctcctctgacaccacccccgtgcacaccacctctcaggagaaggaggaggcccaggccctggacccgccggatgcctgcacggagctcgaggtcatcagggtcaccaagaagaagaaaattggcaagaagaaaaagagcagatcagatgaggaggcaagtccactccaccccgcctgcagccagaagaaatgtgccaagcagggggacggtgacagccgcaacggcagcccaagccttgggcgggactcgccagacactatgcttgcctccccccaggaggagggagaggggccgagcagcaccacggagagcagcgagcgctccgagccgggcctgctgatccctgagatgaaggacacctccatggagcgcttggggcagcccctgagcaaggttatcgaccagctcaacgggcagctggaccccagcacctggtgctcccgtgctgagcccccagaccagtcctttcggaccggctctcccggggatgccccggagaggccgccgctttgcgactttagtgaggggctttcagccccaatggacttctaccgctttaccgtcgagagtccaagcactgttacatcaggtggcggccaccatgaccctgcagggcttggccaaccgctgcatgttcctagtagccctgaggctgctggccaagaagaagagggaggaggaggagagggacagacgcctcggcccctagaggataccacgagggaggctcaggagctggaggcccagctgtccctggtcagggaggggcctgtgtctgagccagagcctgggacccaggaggttctctgccagctcaagcgagaccagcccagcccgtgtctgagtagcgctgaggattctggggtggatgagggacaggggagcccttcggagatggtccattcctcggagttcagagtagacaacaatcacctgctcctgctcatgatccacgtgttccgagaaaacgaagagcagctgttcaaaatgatccggatgagcaccgggcacatggagggcaacctgcagctgctgtacgtgctgctcacagactgctatgtctacctgctccggaaaggggccacagagaagccatacctggtggaagaggccgtttcttacaatgaacttgactatgtgtcggttggccttgaccagcagacggtgaagctggtgtgcaccaaccgcaggaagcagtttctgctggacacggctgatgtggcgctggctgagttctttttggcttctttgaagtcagccatgatcaaaggctgtcgagaacctccctaccccagcatcctgacggatgccaccatggagaagctggcactggccaaatttgtggcccaagaatcgaagtgtgaggcatctgctgtcaccgtgcgcttctacggccttgtgcactgggaggaccccacagacgagtccctgggccccacgccctgccactgctcaccccccgagggcaccatcaccaaagaaggcatgctgcactacaaggcgggcacctcctacctgggcaaggaacactggaagacgtgcttcgtggtgctcagcaacgggatcctctaccagtacccggaccgcaccgacgtcatccctctgctctcggtgaacatggggggggagcagtgcggtggctgccggagagccaacaccacggatcggccccacgccttccaggtcattctctccgaccggccctgcctggagctaagtgccgagagcgaggccgagatggccgagtggatgcagcatctctgccaggctgtgtccaaaggggtcatcccccagggcgtagctcccagcccctgcataccctgctgcctggtcctcacggatgaccgcctctttacgtgccatgaggattgccagaccagcttcttccgctctttgggcacagccaagctgggcgacatcagcgccgtctccaccgagccgggcaaggagtactgcgtcttggagttctcccaggacagccagcagctcctcccgccctgggtcatctacctgagctgcacttctgaactggaccgattgctgtctgcactgaactctgggtggaaaaccatctatcaggtggacctcccccacacggcgatccaggaagcctccaacaagaagaaattcgaggatgccttgagcctcatccacagcgcctggcagcggagcgacagtctctgccgcggccgagcctcccgagacccctggtgctgaggcagagctggttggcgtccctggtgggcaggaaaggaaggcacgccagccggcaggcacactgtcacggctgttgtcatgctgtcgggagcctacagtccacccctgccctgggcggcagaaccaccgagtgtggcttaagacagggtccctccactccagggatccagatcaggtgcccggcacccctgggcatcctgcccgacaggtagcgaatggaggtcgctgggggcagagggtccgagccctgtgggctctgcggatgcacgccctcctcccgggcctccgcctcagtctgcagaatttctgccgagtggcaccgagaacaccatccatctaaggacgaacaaaagaaccaggagggcgggacccccctcttcctctcctgggttgggggctggggccctgagtgcccagccatccttgttcgtgtttgaacactctcctggccacgtggggaagcgggaacacggggtgtctgcgcatgtttcctcctcctagctccatcactgcgcacacagctgcctgcctcgccagatgcaggggggcgggcagccctccctggctgccaggaggctctgcatgcccacagtcctgccctgcctgtcccctcaacccggcagtgcctgtagcaccgaggagcaaagggggtggatggggggcttggagaagggcggagcccaccagcctggcatccatgttgacatcttctgactgtcccctgcttggctggagccaggcccttccctagagtttcgtcaagagcctcctggggaaggggtcaggtggtttgggttttgttttttaaaataaaatagacatgttatattgcc

SEQ ID NO: 993 - DNA, 10199 bp, Homo sapiens
  misc_feature (259)..(259): second gene starts at position 259
atgtcgggggcggggggcgcctttgcctcgccgagggaggtcttgctggagcggccgtgctggctggacgggggctgcgagccggcccgcaggggctacctctaccagcagctgtgctgcgtagatgagcgggatcgtgtgcagaagaaaaccttcaccaagtgggtcaacaagcacctcatcaaggcccagaggcacatcagtgacctgtatgaagacctccgcgatggccacaacctcatctccctgctggaggtcctctcgggggacagcctgccccgggagaaggggaggatgcgtttccacaagctgcagaatgtccagattgccctggactacctccggcaccgccaggtgaagctggtgaacatcaggaatgatgacatcgctgacggcaaccccaagctgacccttggcctcatctggacaatcattctgcacttccagatctcagatatccaggtgagtgggcagtcggaggacatgacggccaaggagaagctgctgctgtggtcgcagcgaatggtggaggggtaccagggcctgcgatgcgacaacttcacctccagctggagagacggccgcctcttcaatgccatcatccaccggcacaagcccctgctcatcgacatgaacaaggtgtaccggcagaccaacctggagaacctggaccaggccttctctgtggcggagcgggacctgggagtgacgcggctcctggaccctgaggacgtggatgtccctcagcccgacgagaagtccatcatcacctacgtctcgtcgctgtatgacgccatgccccgcgtgccggacgtgcaggatggggtgagggccaacgagctgcagctgcgctggcaggagtaccgggagctggtgctgctgctgcttcagtggatgcgacaccacacggccgcctttgaggaacgcaggttcccctccagcttcgaggagattgagatcctgtggtctcagttcctgaagtttaaggagatggagctaccagccaaggaggccgacaagaacaggtccaagggcatctaccaatccctggagggagcggtgcaagcaggccagctcaaggtgccccctggctaccacccgctggatgtggagaaggagtggggcaagctgcacgtggccatcctggagcgggagaagcagctccgcagcgagtttgagaggctggagtgtcttcagcgcatcgtgaccaagctgcagatggaggcggggctgtgtgaggagcagctgaaccaggccgacgccctgctgcagtcggatgtccggctgctggctgcaggcaaagtgccacagcgggcgggggaggtggaacgggacttggacaaggcggatagcatgatccggctgctcttcaacgacgtgcagaccctcaaggatggacggcacccgcagggcgagcagatgtaccgcagggtgtaccgtctgcacgagcgcctggtagccatccgcaccgagtacaacctacggctgaaggcaggcgtggcggcccctgcaacccaggtggcccaggtgactctgcagagtgtgcagaggcgccccgagctggaggactccactctgcgctacctgcaggacctgctggcctgggtggaggagaaccagcaccgtgtggatggcgctgagtggggtgtggacctgcccagcgtggaggcgcagctgggcagccaccgaggcctgcaccagtccatcgaagaattccgggccaagatcgagcgggcacggagtgacgagggccagctctcccccgccacccggggtgcctaccgtgactgcctgggtcggctggacctgcagtacgccaagctgctgaactcctccaaggcccgcctcaggtccctggagagcttgcacagctttgtggcagccgccactaaggagctaatgtggctgaatgagaaggaggaggaggaggtgggcttcgactggagcgaccgcaacaccaacatgaccgccaagaaggagagctactcggcgctgatgcgggagctggagctgaaggagaagaagatcaaggagctccaaaatgctggggaccggctgctgcgggaggaccacccggcccggcccacggtggagtccttccaggcggccctgcagacgcagtggagctggatgctacagctgtgctgctgtatcgaggcacacctgaaggagaacgctgcctactttcagttcttctcagatgtgcgggaggccgaggggcagttgcagaagctgcaggaggcactgcgtaggaaatacagttgtgatcgctccgccaccgtcacccggctggaggacctgctgcaggatgcccaggacgagaaggaacagctgaacgagtacaagggccacctctcaggcctggccaagcgggccaaggccgtcgtgcagctgaagccccgccacccagcccaccccatgcggggccgcctgcccctgctggccgtgtgcgactataagcaggtggaggtgactgtgcacaagggtgacgagtgccagctggtgggccctgcacagccgtcccactggaaggtgctcagcagctccggcagcgaggccgccgtgccctccgtgtgcttcctggtgcccccgcccaaccaggaggcccaggaggccgtcaccaggctggaggcccagcaccaggccctggtcacgctgtggcaccagttgcacgtggacatgaagagccttctggcctggcagagccttcgccgcgacgtgcagctcatccgctcctggtccctggccacgttccgcaccctgaagccagaggagcagcgccaagccctgcacagcctggagctgcactaccaggccttcctgcgggacagccaggacgcgggcggcttcggacccgaggaccggctgatggctgagcgcgagtacggctcctgcagccaccactaccagcagctgctgcagagcctggaacagggtgcacaggaagagtctcgctgccagcgctgcatctccgagctcaaagacatccggctgcagctggaggcctgtgagacgcgcaccgtgcaccgcctgcggctgccgctggacaaagagccggcacgggagtgtgcccagcgcatcgccgagcagcagaaggcacaggcagaggtggaggggctgggcaagggggtcgcccggctctctgccgaggccgagaaggtcttggccctaccagagccatcgcctgcggcccccacgctgcgctcggagctggagctgacgctgggcaagctggagcaggtccgcagcctgtctgccatctacctggagaagctcaagaccatcagcctggtgatccgcggcacgcagggggccgaggaggtgctcagggcccacgaggagcagctcaaggaggcccaggccgtgccggccaccctcccggagctcgaggccaccaaggcctctctgaagaagctgcgggcccaggccgaggcacagcagcccacgttcgacgccctgcgggatgagctgcggggggcacaggaggtgggggagcgactgcagcagcggcacggggagcgggacgtggaggtggagcgctggcgggagcgggtcgcccagttgcttgagcgctggcaggctgtgctggcccagaccgacgtgcggcagcgcgagctcgagcaactgggccgccagctgcgttactaccgcgagagtgcagaccccttgggcgcctggctgcaggacgccaggcggcggcaggagcagatccaggccatgccgctggccgacagccaggctgtgcgggagcagctgcggcaggagcaggccctgctggaggagatcgagcgccacggcgagaaggtcgaggagtgccagaggtttgcgaaacagtacatcaacgccatcaaggactatgaactccagctggtgacgtacaaggcgcagcttgagccggtggcctccccggccaagaagcccaaggtccagtcgggatcagagagtgtcatccaggagtacgtggacctgcgtacgcactacagcgagctgaccacactgacgagccagtacatcaagttcatcagcgagactctgcggcgcatggaggaggaggagaggctggctgagcagcagcgggcagaggagcgcgagcggctggccgaggtggaggccgcgctggagaagcagcggcagctggccgaggcgcacgcccaggcaaaggcacaggcggagcgggaggcgaaggagctgcagcagcgcatgcaggaggaggtggtgcggcgggaggaggcggcggtggacgcgcagcagcagaagcgcagcattcaggaggagctgcagcagctgcggcagagctcggaggcggagatccaggccaaggcccggcaggcagaggcggctgagcgcagccggctgcgcatcgaggaggagatccgcgtggtgcgcctgcagttggaggccaccgagcgccagcgtggcggggctgagggggagctgcaggcactgcgtgcacgggcggaggaggctgaggcacaaaagcgacaggcgcaggaggaggccgagcgcttgcggaggcaggtgcaggacgagagccagcgtaagcggcaggcggaggtggagctggcctcgcgcgtgaaggccgaggccgaggcggcgcgcgagaagcagcgggccctgcaggccctggaggagctgcggctgcaggcggaggaggcggagcggcgcctgcggcaggccgaggtggagcgagcgcggcaggtacaggtggccctggagacggcgcagcgcagtgcagaggcggagctgcagagcaaacgcgcctccttcgccgagaagacggcacagctggagcgctccctgcaggaggaacacgtggctgtggcacagctgcgggaggaggctgagcggcgggcacagcagcaggccgaggccgagcgggcgcgcgaggaggcagagcgggagctggagcgctggcagctcaaggccaacgaggcgctacggctgcggctgcaggcggaggaggtggcgcagcagaagagcctggcgcaggccgaggctgagaagcagaaggaggaggcggagcgcgaggcgcggcggcgcggcaaggcggaggagcaggccgtccggcagcgggagctggctgaacaagagctggagaagcagcggcagctggcggaaggcaccgcgcagcagcgcctggccgcggagcaggagttgatccggctgcgggccgagacggagcagggggagcagcagcggcagctgctggaggaggagctggcccggctgcagcgtgaggcggctgcagccacgcagaaacggcaggagctggaagccgagctggccaaggtgcgggccgagatggaggtgctgctggccagcaaggcgagggctgaggaggagtcgcgctccaccagcgagaagtccaagcagaggctggaggccgaggccggccggttccgcgagctggccgaggaggccgcccgcctgcgtgccctggcggaagaggccaagcggcagcggcagctggccgaggaagacgcggcgcggcagcgggccgaggcggagcgggtgcttgcggagaagctggccgccatcggcgaggccacgcggctcaagacggaggcggagatcgcgctcaaggagaaggaggcggagaacgagcgcctgcggcggctggcggaggacgaggccttccagcggcggcggctggaggagcaggccgcgcaacacaaggctgacatcgaggagcgcctggcccagctgcgcaaggcatcggacagcgagctggagcggcagaaggggctggtggaggacacgctgaggcagcggcggcaggtggaggaggagatcctggcgctgaaggcgagcttcgagaaggcggccgctggcaaggcggagctggagctggagctgggacgcatccgcagcaacgcggaggacacgctgcgcagcaaggagcaggccgagctggaggctgcgaggcagcggcagctggcggcggaggaggagcggcggcgccgtgaggctgaggagcgcgtgcagaagagcctggcggccgaggaggaggccgcacggcagcggaaggcggcgctggaggaagtcgagcggctgaaagccaaggtggaggaggcgcggcgcctgcgggagcgagcggagcaggagtcggcgcggcagctgcagctggcccaggaggccgcccagaagcggctgcaggcggaagagaaggcacacgccttcgcggtgcagcagaaggagcaggagctacagcagacgctgcagcaggagcagagcgtgctggaccagctgcgcggcgagggcggcggcggcggtggcggtggcggtggcggcgacggtggcagcgccatggagccgggggaggtgaaggaccggatcctggagaacatctcgctgtcggtgaagaagttgcagagctattttgctgcatgtgaggatgagatccctgccatccggaaccatgacaaggtcctacagcgtctgtgtgagcacctggaccacgccctgctgtacggactgcaagacctctcctctggctactgggtgctcgtggtgcattttactcggagagaggccatcaagcagatcgaggtgctgcagcacgtggccaccaacctggggcgcagccgtgcctggctgtacctggccctcaacgagaactccttggagagctacctgcggttgttccaggagaacctgggcctgctgcataagtactacgtcaagaatgccctggtctgcagccacgatcacctgacgctcttcctgaccttggtgtccgggctagagttcattcgtttcgagctggatctggatgccccttacctagacctggccccctacatgcccgactactacaaacctcagtacctgctggactttgaagaccgccttcccagctcggtccacggctcagacagtctgtccctcaactctttcaactccgtcacctccaccaacctggagtgggatgacagtgcgattgccccatctagtgaggattatgattttggagatgtgtttccagcagtgccgtctgtacccagcacagactgggaagatggagacctcacagacacggtcagtggtccccgctccacagcctccgacctgaccagcagcaaggcctccaccaggagccccacccagcgccagaaccccttcaacgaggagccggcagagactgtgtcctcctctgacaccacccccgtgcacaccacctctcaggagaaggaggaggcccaggccctggacccgccggatgcctgcacggagctcgaggtcatcagggtcaccaagaagaagaaaattggcaagaagaaaaagagcagatcagatgaggaggcaagtccactccaccccgcctgcagccagaagaaatgtgccaagcagggggacggtgacagccgcaacggcagcccaagccttgggcgggactcgccagacactatgcttgcctccccccaggaggagggagaggggccgagcagcaccacggagagcagcgagcgctccgagccgggcctgctgatccctgagatgaaggacacctccatggagcgcttggggcagcccctgagcaaggttatcgaccagctcaacgggcagctggaccccagcacctggtgctcccgtgctgagcccccagaccagtcctttcggaccggctctcccggggatgccccggagaggccgccgctttgcgactttagtgaggggctttcagccccaatggacttctaccgctttaccgtcgagagtccaagcactgttacatcaggtggcggccaccatgaccctgcagggcttggccaaccgctgcatgttcctagtagccctgaggctgctggccaagaagaagagggaggaggaggagagggacagacgcctcggcccctagaggataccacgagggaggctcaggagctggaggcccagctgtccctggtcagggaggggcctgtgtctgagccagagcctgggacccaggaggttctctgccagctcaagcgagaccagcccagcccgtgtctgagtagcgctgaggattctggggtggatgagggacaggggagcccttcggagatggtccattcctcggagttcagagtagacaacaatcacctgctcctgctcatgatccacgtgttccgagaaaacgaagagcagctgttcaaaatgatccggatgagcaccgggcacatggagggcaacctgcagctgctgtacgtgctgctcacagactgctatgtctacctgctccggaaaggggccacagagaagccatacctggtggaagaggccgtttcttacaatgaacttgactatgtgtcggttggccttgaccagcagacggtgaagctggtgtgcaccaaccgcaggaagcagtttctgctggacacggctgatgtggcgctggctgagttctttttggcttctttgaagtcagccatgatcaaaggctgtcgagaacctccctaccccagcatcctgacggatgccaccatggagaagctggcactggccaaatttgtggcccaagaatcgaagtgtgaggcatctgctgtcaccgtgcgcttctacggccttgtgcactgggaggaccccacagacgagtccctgggccccacgccctgccactgctcaccccccgagggcaccatcaccaaagaaggcatgctgcactacaaggcgggcacctcctacctgggcaaggaacactggaagacgtgcttcgtggtgctcagcaacgggatcctctaccagtacccggaccgcaccgacgtcatccctctgctctcggtgaacatggggggggagcagtgcggtggctgccggagagccaacaccacggatcggccccacgccttccaggtcattctctccgaccggccctgcctggagctaagtgccgagagcgaggccgagatggccgagtggatgcagcatctctgccaggctgtgtccaaaggggtcatcccccagggcgtagctcccagcccctgcataccctgctgcctggtcctcacggatgaccgcctctttacgtgccatgaggattgccagaccagcttcttccgctctttgggcacagccaagctgggcgacatcagcgccgtctccaccgagccgggcaaggagtactgcgtcttggagttctcccaggacagccagcagctcctcccgccctgggtcatctacctgagctgcacttctgaactggaccgattgctgtctgcactgaactctgggtggaaaaccatctatcaggtggacctcccccacacggcgatccaggaagcctccaacaagaagaaattcgaggatgccttgagcctcatccacagcgcctggcagcggagcgacagtctctgccgcggccgagcctcccgagacccctggtgctgaggcagagctggttggcgtccctggtgggcaggaaaggaaggcacgccagccggcaggcacactgtcacggctgttgtcatgctgtcgggagcctacagtccacccctgccctgggcggcagaaccaccgagtgtggcttaagacagggtccctccactccagggatccagatcaggtgcccggcacccctgggcatcctgcccgacaggtagcgaatggaggtcgctgggggcagagggtccgagccctgtgggctctgcggatgcacgccctcctcccgggcctccgcctcagtctgcagaatttctgccgagtggcaccgagaacaccatccatctaaggacgaacaaaagaaccaggagggcgggacccccctcttcctctcctgggttgggggctggggccctgagtgcccagccatccttgttcgtgtttgaacactctcctggccacgtggggaagcgggaacacggggtgtctgcgcatgtttcctcctcctagctccatcactgcgcacacagctgcctgcctcgccagatgcaggggggcgggcagccctccctggctgccaggaggctctgcatgcccacagtcctgccctgcctgtcccctcaacccggcagtgcctgtagcaccgaggagcaaagggggtggatggggggcttggagaagggcggagcccaccagcctggcatccatgttgacatcttctgactgtcccctgcttggctggagccaggcccttccctagagtttcgtcaagagcctcctggggaaggggtcaggtggtttgggttttgttttttaaaataaaatagacatgttatattgcc

SEQ ID NO: 994 - DNA, 10187 bp, Homo sapiens
  misc_feature (247)..(247): second gene starts at position 247
atgtctcagcaccagctccgcgtgccgcagcccgagggcctgggccgaaagagaaccagctcggaggacaacctgtacctggctgtgctcagggcctctgagggcaagaaagatgagcgggatcgtgtgcagaagaaaaccttcaccaagtgggtcaacaagcacctcatcaaggcccagaggcacatcagtgacctgtatgaagacctccgcgatggccacaacctcatctccctgctggaggtcctctcgggggacagcctgccccgggagaaggggaggatgcgtttccacaagctgcagaatgtccagattgccctggactacctccggcaccgccaggtgaagctggtgaacatcaggaatgatgacatcgctgacggcaaccccaagctgacccttggcctcatctggacaatcattctgcacttccagatctcagatatccaggtgagtgggcagtcggaggacatgacggccaaggagaagctgctgctgtggtcgcagcgaatggtggaggggtaccagggcctgcgatgcgacaacttcacctccagctggagagacggccgcctcttcaatgccatcatccaccggcacaagcccctgctcatcgacatgaacaaggtgtaccggcagaccaacctggagaacctggaccaggccttctctgtggcggagcgggacctgggagtgacgcggctcctggaccctgaggacgtggatgtccctcagcccgacgagaagtccatcatcacctacgtctcgtcgctgtatgacgccatgccccgcgtgccggacgtgcaggatggggtgagggccaacgagctgcagctgcgctggcaggagtaccgggagctggtgctgctgctgcttcagtggatgcgacaccacacggccgcctttgaggaacgcaggttcccctccagcttcgaggagattgagatcctgtggtctcagttcctgaagtttaaggagatggagctaccagccaaggaggccgacaagaacaggtccaagggcatctaccaatccctggagggagcggtgcaagcaggccagctcaaggtgccccctggctaccacccgctggatgtggagaaggagtggggcaagctgcacgtggccatcctggagcgggagaagcagctccgcagcgagtttgagaggctggagtgtcttcagcgcatcgtgaccaagctgcagatggaggcggggctgtgtgaggagcagctgaaccaggccgacgccctgctgcagtcggatgtccggctgctggctgcaggcaaagtgccacagcgggcgggggaggtggaacgggacttggacaaggcggatagcatgatccggctgctcttcaacgacgtgcagaccctcaaggatggacggcacccgcagggcgagcagatgtaccgcagggtgtaccgtctgcacgagcgcctggtagccatccgcaccgagtacaacctacggctgaaggcaggcgtggcggcccctgcaacccaggtggcccaggtgactctgcagagtgtgcagaggcgccccgagctggaggactccactctgcgctacctgcaggacctgctggcctgggtggaggagaaccagcaccgtgtggatggcgctgagtggggtgtggacctgcccagcgtggaggcgcagctgggcagccaccgaggcctgcaccagtccatcgaagaattccgggccaagatcgagcgggcacggagtgacgagggccagctctcccccgccacccggggtgcctaccgtgactgcctgggtcggctggacctgcagtacgccaagctgctgaactcctccaaggcccgcctcaggtccctggagagcttgcacagctttgtggcagccgccactaaggagctaatgtggctgaatgagaaggaggaggaggaggtgggcttcgactggagcgaccgcaacaccaacatgaccgccaagaaggagagctactcggcgctgatgcgggagctggagctgaaggagaagaagatcaaggagctccaaaatgctggggaccggctgctgcgggaggaccacccggcccggcccacggtggagtccttccaggcggccctgcagacgcagtggagctggatgctacagctgtgctgctgtatcgaggcacacctgaaggagaacgctgcctactttcagttcttctcagatgtgcgggaggccgaggggcagttgcagaagctgcaggaggcactgcgtaggaaatacagttgtgatcgctccgccaccgtcacccggctggaggacctgctgcaggatgcccaggacgagaaggaacagctgaacgagtacaagggccacctctcaggcctggccaagcgggccaaggccgtcgtgcagctgaagccccgccacccagcccaccccatgcggggccgcctgcccctgctggccgtgtgcgactataagcaggtggaggtgactgtgcacaagggtgacgagtgccagctggtgggccctgcacagccgtcccactggaaggtgctcagcagctccggcagcgaggccgccgtgccctccgtgtgcttcctggtgcccccgcccaaccaggaggcccaggaggccgtcaccaggctggaggcccagcaccaggccctggtcacgctgtggcaccagttgcacgtggacatgaagagccttctggcctggcagagccttcgccgcgacgtgcagctcatccgctcctggtccctggccacgttccgcaccctgaagccagaggagcagcgccaagccctgcacagcctggagctgcactaccaggccttcctgcgggacagccaggacgcgggcggcttcggacccgaggaccggctgatggctgagcgcgagtacggctcctgcagccaccactaccagcagctgctgcagagcctggaacagggtgcacaggaagagtctcgctgccagcgctgcatctccgagctcaaagacatccggctgcagctggaggcctgtgagacgcgcaccgtgcaccgcctgcggctgccgctggacaaagagccggcacgggagtgtgcccagcgcatcgccgagcagcagaaggcacaggcagaggtggaggggctgggcaagggggtcgcccggctctctgccgaggccgagaaggtcttggccctaccagagccatcgcctgcggcccccacgctgcgctcggagctggagctgacgctgggcaagctggagcaggtccgcagcctgtctgccatctacctggagaagctcaagaccatcagcctggtgatccgcggcacgcagggggccgaggaggtgctcagggcccacgaggagcagctcaaggaggcccaggccgtgccggccaccctcccggagctcgaggccaccaaggcctctctgaagaagctgcgggcccaggccgaggcacagcagcccacgttcgacgccctgcgggatgagctgcggggggcacaggaggtgggggagcgactgcagcagcggcacggggagcgggacgtggaggtggagcgctggcgggagcgggtcgcccagttgcttgagcgctggcaggctgtgctggcccagaccgacgtgcggcagcgcgagctcgagcaactgggccgccagctgcgttactaccgcgagagtgcagaccccttgggcgcctggctgcaggacgccaggcggcggcaggagcagatccaggccatgccgctggccgacagccaggctgtgcgggagcagctgcggcaggagcaggccctgctggaggagatcgagcgccacggcgagaaggtcgaggagtgccagaggtttgcgaaacagtacatcaacgccatcaaggactatgaactccagctggtgacgtacaaggcgcagcttgagccggtggcctccccggccaagaagcccaaggtccagtcgggatcagagagtgtcatccaggagtacgtggacctgcgtacgcactacagcgagctgaccacactgacgagccagtacatcaagttcatcagcgagactctgcggcgcatggaggaggaggagaggctggctgagcagcagcgggcagaggagcgcgagcggctggccgaggtggaggccgcgctggagaagcagcggcagctggccgaggcgcacgcccaggcaaaggcacaggcggagcgggaggcgaaggagctgcagcagcgcatgcaggaggaggtggtgcggcgggaggaggcggcggtggacgcgcagcagcagaagcgcagcattcaggaggagctgcagcagctgcggcagagctcggaggcggagatccaggccaaggcccggcaggcagaggcggctgagcgcagccggctgcgcatcgaggaggagatccgcgtggtgcgcctgcagttggaggccaccgagcgccagcgtggcggggctgagggggagctgcaggcactgcgtgcacgggcggaggaggctgaggcacaaaagcgacaggcgcaggaggaggccgagcgcttgcggaggcaggtgcaggacgagagccagcgtaagcggcaggcggaggtggagctggcctcgcgcgtgaaggccgaggccgaggcggcgcgcgagaagcagcgggccctgcaggccctggaggagctgcggctgcaggcggaggaggcggagcggcgcctgcggcaggccgaggtggagcgagcgcggcaggtacaggtggccctggagacggcgcagcgcagtgcagaggcggagctgcagagcaaacgcgcctccttcgccgagaagacggcacagctggagcgctccctgcaggaggaacacgtggctgtggcacagctgcgggaggaggctgagcggcgggcacagcagcaggccgaggccgagcgggcgcgcgaggaggcagagcgggagctggagcgctggcagctcaaggccaacgaggcgctacggctgcggctgcaggcggaggaggtggcgcagcagaagagcctggcgcaggccgaggctgagaagcagaaggaggaggcggagcgcgaggcgcggcggcgcggcaaggcggaggagcaggccgtccggcagcgggagctggctgaacaagagctggagaagcagcggcagctggcggaaggcaccgcgcagcagcgcctggccgcggagcaggagttgatccggctgcgggccgagacggagcagggggagcagcagcggcagctgctggaggaggagctggcccggctgcagcgtgaggcggctgcagccacgcagaaacggcaggagctggaagccgagctggccaaggtgcgggccgagatggaggtgctgctggccagcaaggcgagggctgaggaggagtcgcgctccaccagcgagaagtccaagcagaggctggaggccgaggccggccggttccgcgagctggccgaggaggccgcccgcctgcgtgccctggcggaagaggccaagcggcagcggcagctggccgaggaagacgcggcgcggcagcgggccgaggcggagcgggtgcttgcggagaagctggccgccatcggcgaggccacgcggctcaagacggaggcggagatcgcgctcaaggagaaggaggcggagaacgagcgcctgcggcggctggcggaggacgaggccttccagcggcggcggctggaggagcaggccgcgcaacacaaggctgacatcgaggagcgcctggcccagctgcgcaaggcatcggacagcgagctggagcggcagaaggggctggtggaggacacgctgaggcagcggcggcaggtggaggaggagatcctggcgctgaaggcgagcttcgagaaggcggccgctggcaaggcggagctggagctggagctgggacgcatccgcagcaacgcggaggacacgctgcgcagcaaggagcaggccgagctggaggctgcgaggcagcggcagctggcggcggaggaggagcggcggcgccgtgaggctgaggagcgcgtgcagaagagcctggcggccgaggaggaggccgcacggcagcggaaggcggcgctggaggaagtcgagcggctgaaagccaaggtggaggaggcgcggcgcctgcgggagcgagcggagcaggagtcggcgcggcagctgcagctggcccaggaggccgcccagaagcggctgcaggcggaagagaaggcacacgccttcgcggtgcagcagaaggagcaggagctacagcagacgctgcagcaggagcagagcgtgctggaccagctgcgcggcgagggcggcggcggcggtggcggtggcggtggcggcgacggtggcagcgccatggagccgggggaggtgaaggaccggatcctggagaacatctcgctgtcggtgaagaagttgcagagctattttgctgcatgtgaggatgagatccctgccatccggaaccatgacaaggtcctacagcgtctgtgtgagcacctggaccacgccctgctgtacggactgcaagacctctcctctggctactgggtgctcgtggtgcattttactcggagagaggccatcaagcagatcgaggtgctgcagcacgtggccaccaacctggggcgcagccgtgcctggctgtacctggccctcaacgagaactccttggagagctacctgcggttgttccaggagaacctgggcctgctgcataagtactacgtcaagaatgccctggtctgcagccacgatcacctgacgctcttcctgaccttggtgtccgggctagagttcattcgtttcgagctggatctggatgccccttacctagacctggccccctacatgcccgactactacaaacctcagtacctgctggactttgaagaccgccttcccagctcggtccacggctcagacagtctgtccctcaactctttcaactccgtcacctccaccaacctggagtgggatgacagtgcgattgccccatctagtgaggattatgattttggagatgtgtttccagcagtgccgtctgtacccagcacagactgggaagatggagacctcacagacacggtcagtggtccccgctccacagcctccgacctgaccagcagcaaggcctccaccaggagccccacccagcgccagaaccccttcaacgaggagccggcagagactgtgtcctcctctgacaccacccccgtgcacaccacctctcaggagaaggaggaggcccaggccctggacccgccggatgcctgcacggagctcgaggtcatcagggtcaccaagaagaagaaaattggcaagaagaaaaagagcagatcagatgaggaggcaagtccactccaccccgcctgcagccagaagaaatgtgccaagcagggggacggtgacagccgcaacggcagcccaagccttgggcgggactcgccagacactatgcttgcctccccccaggaggagggagaggggccgagcagcaccacggagagcagcgagcgctccgagccgggcctgctgatccctgagatgaaggacacctccatggagcgcttggggcagcccctgagcaaggttatcgaccagctcaacgggcagctggaccccagcacctggtgctcccgtgctgagcccccagaccagtcctttcggaccggctctcccggggatgccccggagaggccgccgctttgcgactttagtgaggggctttcagccccaatggacttctaccgctttaccgtcgagagtccaagcactgttacatcaggtggcggccaccatgaccctgcagggcttggccaaccgctgcatgttcctagtagccctgaggctgctggccaagaagaagagggaggaggaggagagggacagacgcctcggcccctagaggataccacgagggaggctcaggagctggaggcccagctgtccctggtcagggaggggcctgtgtctgagccagagcctgggacccaggaggttctctgccagctcaagcgagaccagcccagcccgtgtctgagtagcgctgaggattctggggtggatgagggacaggggagcccttcggagatggtccattcctcggagttcagagtagacaacaatcacctgctcctgctcatgatccacgtgttccgagaaaacgaagagcagctgttcaaaatgatccggatgagcaccgggcacatggagggcaacctgcagctgctgtacgtgctgctcacagactgctatgtctacctgctccggaaaggggccacagagaagccatacctggtggaagaggccgtttcttacaatgaacttgactatgtgtcggttggccttgaccagcagacggtgaagctggtgtgcaccaaccgcaggaagcagtttctgctggacacggctgatgtggcgctggctgagttctttttggcttctttgaagtcagccatgatcaaaggctgtcgagaacctccctaccccagcatcctgacggatgccaccatggagaagctggcactggccaaatttgtggcccaagaatcgaagtgtgaggcatctgctgtcaccgtgcgcttctacggccttgtgcactgggaggaccccacagacgagtccctgggccccacgccctgccactgctcaccccccgagggcaccatcaccaaagaaggcatgctgcactacaaggcgggcacctcctacctgggcaaggaacactggaagacgtgcttcgtggtgctcagcaacgggatcctctaccagtacccggaccgcaccgacgtcatccctctgctctcggtgaacatggggggggagcagtgcggtggctgccggagagccaacaccacggatcggccccacgccttccaggtcattctctccgaccggccctgcctggagctaagtgccgagagcgaggccgagatggccgagtggatgcagcatctctgccaggctgtgtccaaaggggtcatcccccagggcgtagctcccagcccctgcataccctgctgcctggtcctcacggatgaccgcctctttacgtgccatgaggattgccagaccagcttcttccgctctttgggcacagccaagctgggcgacatcagcgccgtctccaccgagccgggcaaggagtactgcgtcttggagttctcccaggacagccagcagctcctcccgccctgggtcatctacctgagctgcacttctgaactggaccgattgctgtctgcactgaactctgggtggaaaaccatctatcaggtggacctcccccacacggcgatccaggaagcctccaacaagaagaaattcgaggatgccttgagcctcatccacagcgcctggcagcggagcgacagtctctgccgcggccgagcctcccgagacccctggtgctgaggcagagctggttggcgtccctggtgggcaggaaaggaaggcacgccagccggcaggcacactgtcacggctgttgtcatgctgtcgggagcctacagtccacccctgccctgggcggcagaaccaccgagtgtggcttaagacagggtccctccactccagggatccagatcaggtgcccggcacccctgggcatcctgcccgacaggtagcgaatggaggtcgctgggggcagagggtccgagccctgtgggctctgcggatgcacgccctcctcccgggcctccgcctcagtctgcagaatttctgccgagtggcaccgagaacaccatccatctaaggacgaacaaaagaaccaggagggcgggacccccctcttcctctcctgggttgggggctggggccctgagtgcccagccatccttgttcgtgtttgaacactctcctggccacgtggggaagcgggaacacggggtgtctgcgcatgtttcctcctcctagctccatcactgcgcacacagctgcctgcctcgccagatgcaggggggcgggcagccctccctggctgccaggaggctctgcatgcccacagtcctgccctgcctgtcccctcaacccggcagtgcctgtagcaccgaggagcaaagggggtggatggggggcttggagaagggcggagcccaccagcctggcatccatgttgacatcttctgactgtcccctgcttggctggagccaggcccttccctagagtttcgtcaagagcctcctggggaaggggtcaggtggtttgggttttgttttttaaaataaaatagacatgttatattgcc

SEQ ID NO: 995 - DNA, 10268 bp, Homo sapiens
  misc_feature (328)..(328): second gene starts at position 328
atgtcgggtgaggacgctgaggtccgggcagtctctgaagatgtctccaatggaagcagtggctcgcccagccctggggacacactgccctggaaccttgggaaaacgcagcggagccggcgcagcgggggtggcgctgggagcaacgggagtgtcctggacccagctgagcgggcggtcattcgcatcgcagatgagcgggatcgtgtgcagaagaaaaccttcaccaagtgggtcaacaagcacctcatcaaggcccagaggcacatcagtgacctgtatgaagacctccgcgatggccacaacctcatctccctgctggaggtcctctcgggggacagcctgccccgggagaaggggaggatgcgtttccacaagctgcagaatgtccagattgccctggactacctccggcaccgccaggtgaagctggtgaacatcaggaatgatgacatcgctgacggcaaccccaagctgacccttggcctcatctggacaatcattctgcacttccagatctcagatatccaggtgagtgggcagtcggaggacatgacggccaaggagaagctgctgctgtggtcgcagcgaatggtggaggggtaccagggcctgcgatgcgacaacttcacctccagctggagagacggccgcctcttcaatgccatcatccaccggcacaagcccctgctcatcgacatgaacaaggtgtaccggcagaccaacctggagaacctggaccaggccttctctgtggcggagcgggacctgggagtgacgcggctcctggaccctgaggacgtggatgtccctcagcccgacgagaagtccatcatcacctacgtctcgtcgctgtatgacgccatgccccgcgtgccggacgtgcaggatggggtgagggccaacgagctgcagctgcgctggcaggagtaccgggagctggtgctgctgctgcttcagtggatgcgacaccacacggccgcctttgaggaacgcaggttcccctccagcttcgaggagattgagatcctgtggtctcagttcctgaagtttaaggagatggagctaccagccaaggaggccgacaagaacaggtccaagggcatctaccaatccctggagggagcggtgcaagcaggccagctcaaggtgccccctggctaccacccgctggatgtggagaaggagtggggcaagctgcacgtggccatcctggagcgggagaagcagctccgcagcgagtttgagaggctggagtgtcttcagcgcatcgtgaccaagctgcagatggaggcggggctgtgtgaggagcagctgaaccaggccgacgccctgctgcagtcggatgtccggctgctggctgcaggcaaagtgccacagcgggcgggggaggtggaacgggacttggacaaggcggatagcatgatccggctgctcttcaacgacgtgcagaccctcaaggatggacggcacccgcagggcgagcagatgtaccgcagggtgtaccgtctgcacgagcgcctggtagccatccgcaccgagtacaacctacggctgaaggcaggcgtggcggcccctgcaacccaggtggcccaggtgactctgcagagtgtgcagaggcgccccgagctggaggactccactctgcgctacctgcaggacctgctggcctgggtggaggagaaccagcaccgtgtggatggcgctgagtggggtgtggacctgcccagcgtggaggcgcagctgggcagccaccgaggcctgcaccagtccatcgaagaattccgggccaagatcgagcgggcacggagtgacgagggccagctctcccccgccacccggggtgcctaccgtgactgcctgggtcggctggacctgcagtacgccaagctgctgaactcctccaaggcccgcctcaggtccctggagagcttgcacagctttgtggcagccgccactaaggagctaatgtggctgaatgagaaggaggaggaggaggtgggcttcgactggagcgaccgcaacaccaacatgaccgccaagaaggagagctactcggcgctgatgcgggagctggagctgaaggagaagaagatcaaggagctccaaaatgctggggaccggctgctgcgggaggaccacccggcccggcccacggtggagtccttccaggcggccctgcagacgcagtggagctggatgctacagctgtgctgctgtatcgaggcacacctgaaggagaacgctgcctactttcagttcttctcagatgtgcgggaggccgaggggcagttgcagaagctgcaggaggcactgcgtaggaaatacagttgtgatcgctccgccaccgtcacccggctggaggacctgctgcaggatgcccaggacgagaaggaacagctgaacgagtacaagggccacctctcaggcctggccaagcgggccaaggccgtcgtgcagctgaagccccgccacccagcccaccccatgcggggccgcctgcccctgctggccgtgtgcgactataagcaggtggaggtgactgtgcacaagggtgacgagtgccagctggtgggccctgcacagccgtcccactggaaggtgctcagcagctccggcagcgaggccgccgtgccctccgtgtgcttcctggtgcccccgcccaaccaggaggcccaggaggccgtcaccaggctggaggcccagcaccaggccctggtcacgctgtggcaccagttgcacgtggacatgaagagccttctggcctggcagagccttcgccgcgacgtgcagctcatccgctcctggtccctggccacgttccgcaccctgaagccagaggagcagcgccaagccctgcacagcctggagctgcactaccaggccttcctgcgggacagccaggacgcgggcggcttcggacccgaggaccggctgatggctgagcgcgagtacggctcctgcagccaccactaccagcagctgctgcagagcctggaacagggtgcacaggaagagtctcgctgccagcgctgcatctccgagctcaaagacatccggctgcagctggaggcctgtgagacgcgcaccgtgcaccgcctgcggctgccgctggacaaagagccggcacgggagtgtgcccagcgcatcgccgagcagcagaaggcacaggcagaggtggaggggctgggcaagggggtcgcccggctctctgccgaggccgagaaggtcttggccctaccagagccatcgcctgcggcccccacgctgcgctcggagctggagctgacgctgggcaagctggagcaggtccgcagcctgtctgccatctacctggagaagctcaagaccatcagcctggtgatccgcggcacgcagggggccgaggaggtgctcagggcccacgaggagcagctcaaggaggcccaggccgtgccggccaccctcccggagctcgaggccaccaaggcctctctgaagaagctgcgggcccaggccgaggcacagcagcccacgttcgacgccctgcgggatgagctgcggggggcacaggaggtgggggagcgactgcagcagcggcacggggagcgggacgtggaggtggagcgctggcgggagcgggtcgcccagttgcttgagcgctggcaggctgtgctggcccagaccgacgtgcggcagcgcgagctcgagcaactgggccgccagctgcgttactaccgcgagagtgcagaccccttgggcgcctggctgcaggacgccaggcggcggcaggagcagatccaggccatgccgctggccgacagccaggctgtgcgggagcagctgcggcaggagcaggccctgctggaggagatcgagcgccacggcgagaaggtcgaggagtgccagaggtttgcgaaacagtacatcaacgccatcaaggactatgaactccagctggtgacgtacaaggcgcagcttgagccggtggcctccccggccaagaagcccaaggtccagtcgggatcagagagtgtcatccaggagtacgtggacctgcgtacgcactacagcgagctgaccacactgacgagccagtacatcaagttcatcagcgagactctgcggcgcatggaggaggaggagaggctggctgagcagcagcgggcagaggagcgcgagcggctggccgaggtggaggccgcgctggagaagcagcggcagctggccgaggcgcacgcccaggcaaaggcacaggcggagcgggaggcgaaggagctgcagcagcgcatgcaggaggaggtggtgcggcgggaggaggcggcggtggacgcgcagcagcagaagcgcagcattcaggaggagctgcagcagctgcggcagagctcggaggcggagatccaggccaaggcccggcaggcagaggcggctgagcgcagccggctgcgcatcgaggaggagatccgcgtggtgcgcctgcagttggaggccaccgagcgccagcgtggcggggctgagggggagctgcaggcactgcgtgcacgggcggaggaggctgaggcacaaaagcgacaggcgcaggaggaggccgagcgcttgcggaggcaggtgcaggacgagagccagcgtaagcggcaggcggaggtggagctggcctcgcgcgtgaaggccgaggccgaggcggcgcgcgagaagcagcgggccctgcaggccctggaggagctgcggctgcaggcggaggaggcggagcggcgcctgcggcaggccgaggtggagcgagcgcggcaggtacaggtggccctggagacggcgcagcgcagtgcagaggcggagctgcagagcaaacgcgcctccttcgccgagaagacggcacagctggagcgctccctgcaggaggaacacgtggctgtggcacagctgcgggaggaggctgagcggcgggcacagcagcaggccgaggccgagcgggcgcgcgaggaggcagagcgggagctggagcgctggcagctcaaggccaacgaggcgctacggctgcggctgcaggcggaggaggtggcgcagcagaagagcctggcgcaggccgaggctgagaagcagaaggaggaggcggagcgcgaggcgcggcggcgcggcaaggcggaggagcaggccgtccggcagcgggagctggctgaacaagagctggagaagcagcggcagctggcggaaggcaccgcgcagcagcgcctggccgcggagcaggagttgatccggctgcgggccgagacggagcagggggagcagcagcggcagctgctggaggaggagctggcccggctgcagcgtgaggcggctgcagccacgcagaaacggcaggagctggaagccgagctggccaaggtgcgggccgagatggaggtgctgctggccagcaaggcgagggctgaggaggagtcgcgctccaccagcgagaagtccaagcagaggctggaggccgaggccggccggttccgcgagctggccgaggaggccgcccgcctgcgtgccctggcggaagaggccaagcggcagcggcagctggccgaggaagacgcggcgcggcagcgggccgaggcggagcgggtgcttgcggagaagctggccgccatcggcgaggccacgcggctcaagacggaggcggagatcgcgctcaaggagaaggaggcggagaacgagcgcctgcggcggctggcggaggacgaggccttccagcggcggcggctggaggagcaggccgcgcaacacaaggctgacatcgaggagcgcctggcccagctgcgcaaggcatcggacagcgagctggagcggcagaaggggctggtggaggacacgctgaggcagcggcggcaggtggaggaggagatcctggcgctgaaggcgagcttcgagaaggcggccgctggcaaggcggagctggagctggagctgggacgcatccgcagcaacgcggaggacacgctgcgcagcaaggagcaggccgagctggaggctgcgaggcagcggcagctggcggcggaggaggagcggcggcgccgtgaggctgaggagcgcgtgcagaagagcctggcggccgaggaggaggccgcacggcagcggaaggcggcgctggaggaagtcgagcggctgaaagccaaggtggaggaggcgcggcgcctgcgggagcgagcggagcaggagtcggcgcggcagctgcagctggcccaggaggccgcccagaagcggctgcaggcggaagagaaggcacacgccttcgcggtgcagcagaaggagcaggagctacagcagacgctgcagcaggagcagagcgtgctggaccagctgcgcggcgagggcggcggcggcggtggcggtggcggtggcggcgacggtggcagcgccatggagccgggggaggtgaaggaccggatcctggagaacatctcgctgtcggtgaagaagttgcagagctattttgctgcatgtgaggatgagatccctgccatccggaaccatgacaaggtcctacagcgtctgtgtgagcacctggaccacgccctgctgtacggactgcaagacctctcctctggctactgggtgctcgtggtgcattttactcggagagaggccatcaagcagatcgaggtgctgcagcacgtggccaccaacctggggcgcagccgtgcctggctgtacctggccctcaacgagaactccttggagagctacctgcggttgttccaggagaacctgggcctgctgcataagtactacgtcaagaatgccctggtctgcagccacgatcacctgacgctcttcctgaccttggtgtccgggctagagttcattcgtttcgagctggatctggatgccccttacctagacctggccccctacatgcccgactactacaaacctcagtacctgctggactttgaagaccgccttcccagctcggtccacggctcagacagtctgtccctcaactctttcaactccgtcacctccaccaacctggagtgggatgacagtgcgattgccccatctagtgaggattatgattttggagatgtgtttccagcagtgccgtctgtacccagcacagactgggaagatggagacctcacagacacggtcagtggtccccgctccacagcctccgacctgaccagcagcaaggcctccaccaggagccccacccagcgccagaaccccttcaacgaggagccggcagagactgtgtcctcctctgacaccacccccgtgcacaccacctctcaggagaaggaggaggcccaggccctggacccgccggatgcctgcacggagctcgaggtcatcagggtcaccaagaagaagaaaattggcaagaagaaaaagagcagatcagatgaggaggcaagtccactccaccccgcctgcagccagaagaaatgtgccaagcagggggacggtgacagccgcaacggcagcccaagccttgggcgggactcgccagacactatgcttgcctccccccaggaggagggagaggggccgagcagcaccacggagagcagcgagcgctccgagccgggcctgctgatccctgagatgaaggacacctccatggagcgcttggggcagcccctgagcaaggttatcgaccagctcaacgggcagctggaccccagcacctggtgctcccgtgctgagcccccagaccagtcctttcggaccggctctcccggggatgccccggagaggccgccgctttgcgactttagtgaggggctttcagccccaatggacttctaccgctttaccgtcgagagtccaagcactgttacatcaggtggcggccaccatgaccctgcagggcttggccaaccgctgcatgttcctagtagccctgaggctgctggccaagaagaagagggaggaggaggagagggacagacgcctcggcccctagaggataccacgagggaggctcaggagctggaggcccagctgtccctggtcagggaggggcctgtgtctgagccagagcctgggacccaggaggttctctgccagctcaagcgagaccagcccagcccgtgtctgagtagcgctgaggattctggggtggatgagggacaggggagcccttcggagatggtccattcctcggagttcagagtagacaacaatcacctgctcctgctcatgatccacgtgttccgagaaaacgaagagcagctgttcaaaatgatccggatgagcaccgggcacatggagggcaacctgcagctgctgtacgtgctgctcacagactgctatgtctacctgctccggaaaggggccacagagaagccatacctggtggaagaggccgtttcttacaatgaacttgactatgtgtcggttggccttgaccagcagacggtgaagctggtgtgcaccaaccgcaggaagcagtttctgctggacacggctgatgtggcgctggctgagttctttttggcttctttgaagtcagccatgatcaaaggctgtcgagaacctccctaccccagcatcctgacggatgccaccatggagaagctggcactggccaaatttgtggcccaagaatcgaagtgtgaggcatctgctgtcaccgtgcgcttctacggccttgtgcactgggaggaccccacagacgagtccctgggccccacgccctgccactgctcaccccccgagggcaccatcaccaaagaaggcatgctgcactacaaggcgggcacctcctacctgggcaaggaacactggaagacgtgcttcgtggtgctcagcaacgggatcctctaccagtacccggaccgcaccgacgtcatccctctgctctcggtgaacatggggggggagcagtgcggtggctgccggagagccaacaccacggatcggccccacgccttccaggtcattctctccgaccggccctgcctggagctaagtgccgagagcgaggccgagatggccgagtggatgcagcatctctgccaggctgtgtccaaaggggtcatcccccagggcgtagctcccagcccctgcataccctgctgcctggtcctcacggatgaccgcctctttacgtgccatgaggattgccagaccagcttcttccgctctttgggcacagccaagctgggcgacatcagcgccgtctccaccgagccgggcaaggagtactgcgtcttggagttctcccaggacagccagcagctcctcccgccctgggtcatctacctgagctgcacttctgaactggaccgattgctgtctgcactgaactctgggtggaaaaccatctatcaggtggacctcccccacacggcgatccaggaagcctccaacaagaagaaattcgaggatgccttgagcctcatccacagcgcctggcagcggagcgacagtctctgccgcggccgagcctcccgagacccctggtgctgaggcagagctggttggcgtccctggtgggcaggaaaggaaggcacgccagccggcaggcacactgtcacggctgttgtcatgctgtcgggagcctacagtccacccctgccctgggcggcagaaccaccgagtgtggcttaagacagggtccctccactccagggatccagatcaggtgcccggcacccctgggcatcctgcccgacaggtagcgaatggaggtcgctgggggcagagggtccgagccctgtgggctctgcggatgcacgccctcctcccgggcctccgcctcagtctgcagaatttctgccgagtggcaccgagaacaccatccatctaaggacgaacaaaagaaccaggagggcgggacccccctcttcctctcctgggttgggggctggggccctgagtgcccagccatccttgttcgtgtttgaacactctcctggccacgtggggaagcgggaacacggggtgtctgcgcatgtttcctcctcctagctccatcactgcgcacacagctgcctgcctcgccagatgcaggggggcgggcagccctccctggctgccaggaggctctgcatgcccacagtcctgccctgcctgtcccctcaacccggcagtgcctgtagcaccgaggagcaaagggggtggatggggggcttggagaagggcggagcccaccagcctggcatccatgttgacatcttctgactgtcccctgcttggctggagccaggcccttccctagagtttcgtcaagagcctcctggggaaggggtcaggtggtttgggttttgttttttaaaataaaatagacatgttatattgcc

SEQ ID NO: 996 - DNA, 3489 bp, Homo sapiens
  misc_feature (637)..(637): second gene starts at position 637
atgtgtgccgagcggctgggccagttcatgaccctggctttggtgttggccacctttgacccggcgcgggggaccgacgccaccaacccacccgagggtccccaagacaggagctcccagcagaaaggccgcctgtccctgcagaatacagcggagatccagcactgtttggtcaacgctggcgatgtggggtgtggcgtgtttgaatgtttcgagaacaactcttgtgagattcggggcttacatgggatttgcatgacttttctgcacaacgctggaaaatttgatgcccagggcaagtcattcatcaaagacgccttgaaatgtaaggcccacgctctgcggcacaggttcggctgcataagccggaagtgcccggccatcagggaaatggtgtcccagttgcagcgggaatgctacctcaagcacgacctgtgcgcggctgcccaggagaacacccgggtgatagtggagatgatccatttcaaggacttgctgctgcacgaaccctacgtggacctcgtgaacttgctgctgacctgtggggaggaggtgaaggaggccatcacccacagcgtgcaggttcagtgtgagcagaactggggaagcctgtgctccatcttgagcttctgcaccccccgcccccccccccccatcgctgcctcgcaggaggcgaacgccgcgaccccagcggagcccgcggcccagccttgatcccccaaccccgggggctggcatgagcggcccctcggcggcaccgtggggcggtggagtcgcctccgcctgatccccggcctgtcgcccgaccccacctcgccaaccgaggcggaccgcggagtgtgcgaacgaccccaccgctgctttctcctcccccagatcacgcaccccagctccggaagatggggaactgcctcaaatcccccacctcggatgacatctccctgcttcacgagtctcagtccgaccgggctagctttggcgaggggacggagccggatcaggagccgccgccgccatatcaggaacaagttccagttccagtctaccacccaacacctagccagactcggctagcaactcagctgactgaagaggaacaaattaggatagctcaaagaataggtcttatacaacatctgcctaaaggagtttatgaccctggaagagatggatcagaaaaaaagatccgggagtgtgtgatctgtatgatggactttgtttatggggacccaattcgatttctgccgtgcatgcacatctatcacctggactgtatagatgactggttgatgagatccttcacgtgcccctcctgcatggagccagttgatgcagcactgctttcatcctatgagactaattgagccagggtctcttatctgacttcaagtgaaccaccattttggtggttttgatcttttgtcactgagcccaaagagccagggattaggaattaagatcgtgcacaaaagtttccttaaaattcctggatggctgcagatgttgggggaaaaagtacgtgatattttagaaacttagtgggaaaagtaggatggtatttttatgtaaagccttgacccaatgtttaaaaatataattgtatttagatcttgttattgctccagtacataggaattgtgtaaagtgttaacagcagctgtatttgtttaaattgtgtgtattgaagattaggaaaaagatagtagttatttttcctaaatgaaataactttcttctcttccccttccccacccgaattcttttctgaagttgctggcatttgggtcaaggttttattaaaagctacattttataacactggcacacacaaaaaagtagttttaagcttgtttgcacagttctttttttccattggaaatggaattcattgccttaggtctttttaaatagtgtattattatcgttggggctggctctatgcttgaaaaccagtttatttataacctgttataagtgctatattctgtttgcagttaggaaatgcagaattcaaagtgatctcctagcttgtaagcaaactgagatgcactatcccttttctataaaaaataagttaatgtgtcaagaaaccaactctattaaggtggggtttaatattaccctttcctatgtgttttatctaattattttggttgttaatatggtgataatggaaagtcaagttaaattttaaatattaagaattctgatttattgagattgaattatgccaccacgtttatgtaaaaatgaaggtggcaccgtggtgagacctaatgagaaatagttactcagttgtaaaaattttgatttattctctttcttctgacctccttgcctcttgtcttgaaccatagcaaaaggatactgcatctctcattactgtagtgctgaggttattgaagttatacaaaacacatctcagtctctgtttcttggaaaggtatctattacatcctgctagctgactgacaaaactaagcagggagaataaagataattgtattttatgttttgcacacaaacgcagaatttgtataaccatatgacttcatagttgtgatctcaaaaaagaaggaatttctcctttgtttcttgcagttaatgtaagaatactttaaatctctaagcttctgaagtgttagaggtagagatggtctagtaaagatgtagtagtaatgttttatccatttagcatgtgtttattttttcatatgtactcaaaggtgacttattggttcacctcagtgatattacagctaaaaaaatcattcattagcaaaaggaaaagtggtctcaacctaacatcagaagtgtttcttattattattttatattgagttgaatattgaactctaacagttttctacatacaaaacacagtgtcatgaaggttattcataattgcattatagaggaatgtagtatgtcataagtactttgtaaagatttgacattcaactgtagtatccatatgttgcttaaatttccttatgagccccatgatggaaagacttaaagatgaatttgagaaaaattgaaagaaattagattatcaggttctgttaaattgttacatgtatcttgcttaaatttctgtttattaatttatatccacccaagtacataaagcaaatttggaggaaacaactgaagttgtgcaatattttctgataattgctttttttattcttgtgttttctacttaaacataatgtctgtgtcatcaagtattatagtcagacttttctttttttctagattgttaaaattggcaaatgaacttttttaaaaatcatcttccatgttgcagttagtctttcttttcattacaagtctttcacagaagtttggtggtaatattgaaagaactagcattgggcagaatgtgtcttttttaggcactttatattctcaacatacaatgttaagaaccatcaattttgacttttactaagttgttaaataaagttataatacagctgtgaa

SEQ ID NO: 997 - DNA, 32765 bp, Homo sapiens
  misc_feature (438)..(438): second gene starts at position 438
cttgccgcgctgcactccaccacgcctcctccaagtcccagcgaacccgcgtgcaacctgtcccgactctagccgcctcttcagctcgccatggatcccaactgctcctgcgccgccggtgactcctgcacctgcgccggctcctgcaaatgcaaagagtgcaaatgcacctcctgcaagaaaagctgctgctcctgctgccctgtgggctgtgccaagtgtgcccagggctgcatctgcaaaggggcgtcggacaagtgcagctgctgcgcctgatgctgggacagccccgctcccagatgtaaagaacgcgacttccacaaacctggattttttatgtacaaccctgaccgtgaccgtttgctatattcctttttctatgaaataatgtgaatgataataaaacagctttgacttgcttgccgcgctgcactccatttggaggtggtgccggtagtggatttggtttcggcggtggagctggtggtggctttgggctcggtggcggagctggctttggaggtggcttcggtggccctggctttcctgtctgccctcctggaggtatccaagaggtcactgtcaaccagagtctcctgactcccctcaacctgcaaatcgaccccagcatccagagggtgaggaccgaggagcgcgagcagatcaagaccctcaacaataagtttgcctccttcatcgacaaggtgcggttcctggagcagcagaacaaggttctggacaccaagtggaccctgctgcaggagcagggcaccaagactgtgaggcagaacctggagccgttgttcgagcagtacatcaacaacctcaggaggcagctggacagcatcgtgggggaacggggccgcctggactcagagctgagaaacatgcaggacctggtggaagacttcaagaacaagtatgaggatgaaatcaacaagcgtaccactgctgagaatgagtttgtgatgctgaagaaggatgtagatgctgcctacatgaacaaggtggagctggaggccaaggttgatgcactgatggatgagattaacttcatgaagatgttctttgatgcggagctgtcccagatgcagacgcatgtctctgacacctcagtggtcctctccatggacaacaaccgcaacctggacctggatagcatcatcgctgaggtcaaggcccagtatgaggagattgccaaccgcagccggacagaagccgagtcctggtatcagaccaagtatgaggagctgcagcagacagctggccggcatggcgatgacctccgcaacaccaagcatgagatctctgagatgaaccggatgatccagaggctgagagccgagattgacaatgtcaagaaacagtgcgccaatctgcagaacgccattgcggatgccgagcagcgtggggagctggccctcaaggatgccaggaacaagctggccgagctggaggaggccctgcagaaggccaagcaggacatggcccggctgctgcgtgagtaccaggagctcatgaacaccaagctggccctggacgtggagatcgccacttaccgcaagctgctggagggcgaggaatgcagactcagtggagaaggagttggaccagtcaacatctctgttgtcacaagcagtgtttcctctggatatggcagtggcagtggctatggcggtggcctcggtggaggtcttggcggcggcctcggtggaggtcttgccggaggtagcagtggaagctactactccagcagcagtgggggtgtcggcctaggtggtgggctcagtgtggggggctctggcttcagtgcaagcagtggccgagggctgggggtgggctttggcagtggcgggggtagcagctccagcgtcaaatttgtctccaccacctcctcctcccggaagagcttcaagagctaagaacctgctgcaagtcactgccttccaagtgcagcaacccagcccatggagattgcctcttctaggcagttgctcaagccatgttttatccttttctggagagtagtctagaccaagccaattgcagaaccacattctttggttcccaggagagccccattcccagcccctggtctcccgtgccgcagttctatattctgcttcaaatcagccttcaggtttcccacagcatggcccctgctgacacgagaacccaaagttttcccaaatctaaatcatcaaaacagaatccccaccccaatcccaaattttgttttggttctaactacctccagaatgtgttcaataaaatgcttttataatataatcgacagctctctcgcccagcccagttctggaagggataaaaagggggcatcaccgttcctgggtaacagagccaccttctgcgtcctgctgagctctgttctctccagcacctcccaacccactagtgcctggttctcttgctccaccaggaacaagccaccatgtctcgccagtcaagtgtgtccttccggagcgggggcagtcgtagcttcagcaccgcctctgccatcaccccgtctgtctcccgcaccagcttcacctccgtgtcccggtccgggggtggcggtggtggtggcttcggcagggtcagccttgcgggtgcttgtggagtgggtggctatggcagccggagcctctacaacctggggggctccaagaggatatccatcagcactagtggtggcagcttcaggaaccggtttggtgctggtgctggaggcggctatggctttggaggtggtgccggtagtggatttggtttcggcggtggagctggtggtggctttgggctcggtggcggagctggctttggaggtggcttcggtggccctggctttcctgtctgccctcctggaggtatccaagaggtcactgtcaaccagagtctcctgactcccctcaacctgcaaatcgaccccagcatccagagggtgaggaccgaggagcgcgagcagatcaagaccctcaacaataagtttgcctccttcatcgacaaggtgcggttcctggagcagcagaacaaggttctggacaccaagtggaccctgctgcaggagcagggcaccaagactgtgaggcagaacctggagccgttgttcgagcagtacatcaacaacctcaggaggcagctggacagcatcgtgggggaacggggccgcctggactcagagctgagaaacatgcaggacctggtggaagacttcaagaacaagtatgaggatgaaatcaacaagcgtaccactgctgagaatgagtttgtgatgctgaagaaggatgtagatgctgcctacatgaacaaggtggagctggaggccaaggttgatgcactgatggatgagattaacttcatgaagatgttctttgatgcggagctgtcccagatgcagacgcatgtctctgacacctcagtggtcctctccatggacaacaaccgcaacctggacctggatagcatcatcgctgaggtcaaggcccagtatgaggagattgccaaccgcagccggacagaagccgagtcctggtatcagaccaagtatgaggagctgcagcagacagctggccggcatggcgatgacctccgcaacaccaagcatgagatctctgagatgaaccggatgatccagaggctgagagccgagattgacaatgtcaagaaacagtgcgccaatctgcagaacgccattgcggatgccgagcagcgtggggagctggccctcaaggatgccaggaacaagctggccgagctggaggaggccctgcagaaggccaagcaggacatggcccggctgctgcgtgagtaccaggagctcatgaacaccaagctggccctggacgtggagatcgccacttaccgcaagctgctggagggcgaggaatgcagactcagtggagaaggagttggaccagtcaacatctctgttgtcacaagcagtgtttcctctggatatggcagtggcagtggctatggcggtggcctcggtggaggtcttggcggcggcctcggtggaggtcttgccggaggtagcagtggaagctactactccagcagcagtgggggtgtcggcctaggtggtgggctcagtgtggggggctctggcttcagtgcaagcagtggccgagggctgggggtgggctttggcagtggcgggggtagcagctccagcgtcaaatttgtctccaccacctcctcctcccggaagagcttcaagagctaagaacctgctgcaagtcactgccttccaagtgcagcaacccagcccatggagattgcctcttctaggcagttgctcaagccatgttttatccttttctggagagtagtctagaccaagccaattgcagaaccacattctttggttcccaggagagccccattcccagcccctggtctcccgtgccgcagttctatattctgcttcaaatcagccttcaggtttcccacagcatggcccctgctgacacgagaacccaaagttttcccaaatctaaatcatcaaaacagaatccccaccccaatcccaaattttgttttggttctaactacctccagaatgtgttcaataaaatgcttttataatataatcgacagctctctcgcccagcccagttctggaagggataaaaagggggcatcaccgttcctgggtaacagagccaccttctgcgtcctgctgagctctgttctctccagcacctcccaacccactagtgcctggttctcttgctccaccaggaacaagccaccatgtctcgccagtcaagtgtgtccttccggagcgggggcagtcgtagcttcagcaccgcctctgccatcaccccgtctgtctcccgcaccagcttcacctccgtgtcccggtccgggggtggcggtggtggtggcttcggcagggtcagccttgcgggtgcttgtggagtgggtggctatggcagccggagcctctacaacctggggggctccaagaggatatccatcagcactagtggtggcagcttcaggaaccggtttggtgctggtgctggaggcggctatggctttggaggtggtgccggtagtggatttggtttcggcggtggagctggtggtggctttgggctcggtggcggagctggctttggaggtggcttcggtggccctggctttcctgtctgccctcctggaggtatccaagaggtcactgtcaaccagagtctcctgactcccctcaacctgcaaatcgaccccagcatccagagggtgaggaccgaggagcgcgagcagatcaagaccctcaacaataagtttgcctccttcatcgacaaggtgcggttcctggagcagcagaacaaggttctggacaccaagtggaccctgctgcaggagcagggcaccaagactgtgaggcagaacctggagccgttgttcgagcagtacatcaacaacctcaggaggcagctggacagcatcgtgggggaacggggccgcctggactcagagctgagaaacatgcaggacctggtggaagacttcaagaacaagtatgaggatgaaatcaacaagcgtaccactgctgagaatgagtttgtgatgctgaagaaggatgtagatgctgcctacatgaacaaggtggagctggaggccaaggttgatgcactgatggatgagattaacttcatgaagatgttctttgatgcggagctgtcccagatgcagacgcatgtctctgacacctcagtggtcctctccatggacaacaaccgcaacctggacctggatagcatcatcgctgaggtcaaggcccagtatgaggagattgccaaccgcagccggacagaagccgagtcctggtatcagaccaagtatgaggagctgcagcagacagctggccggcatggcgatgacctccgcaacaccaagcatgagatctctgagatgaaccggatgatccagaggctgagagccgagattgacaatgtcaagaaacagtgcgccaatctgcagaacgccattgcggatgccgagcagcgtggggagctggccctcaaggatgccaggaacaagctggccgagctggaggaggccctgcagaaggccaagcaggacatggcccggctgctgcgtgagtaccaggagctcatgaacaccaagctggccctggacgtggagatcgccacttaccgcaagctgctggagggcgaggaatgcagactcagtggagaaggagttggaccagtcaacatctctgttgtcacaagcagtgtttcctctggatatggcagtggcagtggctatggcggtggcctcggtggaggtcttggcggcggcctcggtggaggtcttgccggaggtagcagtggaagctactactccagcagcagtgggggtgtcggcctaggtggtgggctcagtgtggggggctctggcttcagtgcaagcagtggccgagggctgggggtgggctttggcagtggcgggggtagcagctccagcgtcaaatttgtctccaccacctcctcctcccggaagagcttcaagagctaagaacctgctgcaagtcactgccttccaagtgcagcaacccagcccatggagattgcctcttctaggcagttgctcaagccatgttttatccttttctggagagtagtctagaccaagccaattgcagaaccacattctttggttcccaggagagccccattcccagcccctggtctcccgtgccgcagttctatattctgcttcaaatcagccttcaggtttcccacagcatggcccctgctgacacgagaacccaaagttttcccaaatctaaatcatcaaaacagaatccccaccccaatcccaaattttgttttggttctaactacctccagaatgtgttcaataaaatgcttttataatataatcgacagctctctcgcccagcccagttctggaagggataaaaagggggcatcaccgttcctgggtaacagagccaccttctgcgtcctgctgagctctgttctctccagcacctcccaacccactagtgcctggttctcttgctccaccaggaacaagccaccatgtctcgccagtcaagtgtgtccttccggagcgggggcagtcgtagcttcagcaccgcctctgccatcaccccgtctgtctcccgcaccagcttcacctccgtgtcccggtccgggggtggcggtggtggtggcttcggcagggtcagccttgcgggtgcttgtggagtgggtggctatggcagccggagcctctacaacctggggggctccaagaggatatccatcagcactagtggtggcagcttcaggaaccggtttggtgctggtgctggaggcggctatggctttggaggtggtgccggtagtggatttggtttcggcggtggagctggtggtggctttgggctcggtggcggagctggctttggaggtggcttcggtggccctggctttcctgtctgccctcctggaggtatccaagaggtcactgtcaaccagagtctcctgactcccctcaacctgcaaatcgaccccagcatccagagggtgaggaccgaggagcgcgagcagatcaagaccctcaacaataagtttgcctccttcatcgacaaggtgcggttcctggagcagcagaacaaggttctggacaccaagtggaccctgctgcaggagcagggcaccaagactgtgaggcagaacctggagccgttgttcgagcagtacatcaacaacctcaggaggcagctggacagcatcgtgggggaacggggccgcctggactcagagctgagaaacatgcaggacctggtggaagacttcaagaacaagtatgaggatgaaatcaacaagcgtaccactgctgagaatgagtttgtgatgctgaagaaggatgtagatgctgcctacatgaacaaggtggagctggaggccaaggttgatgcactgatggatgagattaacttcatgaagatgttctttgatgcggagctgtcccagatgcagacgcatgtctctgacacctcagtggtcctctccatggacaacaaccgcaacctggacctggatagcatcatcgctgaggtcaaggcccagtatgaggagattgccaaccgcagccggacagaagccgagtcctggtatcagaccaagtatgaggagctgcagcagacagctggccggcatggcgatgacctccgcaacaccaagcatgagatctctgagatgaaccggatgatccagaggctgagagccgagattgacaatgtcaagaaacagtgcgccaatctgcagaacgccattgcggatgccgagcagcgtggggagctggccctcaaggatgccaggaacaagctggccgagctggaggaggccctgcagaaggccaagcaggacatggcccggctgctgcgtgagtaccaggagctcatgaacaccaagctggccctggacgtggagatcgccacttaccgcaagctgctggagggcgaggaatgcagactcagtggagaaggagttggaccagtcaacatctctgttgtcacaagcagtgtttcctctggatatggcagtggcagtggctatggcggtggcctcggtggaggtcttggcggcggcctcggtggaggtcttgccggaggtagcagtggaagctactactccagcagcagtgggggtgtcggcctaggtggtgggctcagtgtggggggctctggcttcagtgcaagcagtggccgagggctgggggtgggctttggcagtggcgggggtagcagctccagcgtcaaatttgtctccaccacctcctcctcccggaagagcttcaagagctaagaacctgctgcaagtcactgccttccaagtgcagcaacccagcccatggagattgcctcttctaggcagttgctcaagccatgttttatccttttctggagagtagtctagaccaagccaattgcagaaccacattctttggttcccaggagagccccattcccagcccctggtctcccgtgccgcagttctatattctgcttcaaatcagccttcaggtttcccacagcatggcccctgctgacacgagaacccaaagttttcccaaatctaaatcatcaaaacagaatccccaccccaatcccaaattttgttttggttctaactacctccagaatgtgttcaataaaatgcttttataatataatcgacagctctctcgcccagcccagttctggaagggataaaaagggggcatcaccgttcctgggtaacagagccaccttctgcgtcctgctgagctctgttctctccagcacctcccaacccactagtgcctggttctcttgctccaccaggaacaagccaccatgtctcgccagtcaagtgtgtccttccggagcgggggcagtcgtagcttcagcaccgcctctgccatcaccccgtctgtctcccgcaccagcttcacctccgtgtcccggtccgggggtggcggtggtggtggcttcggcagggtcagccttgcgggtgcttgtggagtgggtggctatggcagccggagcctctacaacctggggggctccaagaggatatccatcagcactagtggtggcagcttcaggaaccggtttggtgctggtgctggaggcggctatggctttggaggtggtgccggtagtggatttggtttcggcggtggagctggtggtggctttgggctcggtggcggagctggctttggaggtggcttcggtggccctggctttcctgtctgccctcctggaggtatccaagaggtcactgtcaaccagagtctcctgactcccctcaacctgcaaatcgaccccagcatccagagggtgaggaccgaggagcgcgagcagatcaagaccctcaacaataagtttgcctccttcatcgacaaggtgcggttcctggagcagcagaacaaggttctggacaccaagtggaccctgctgcaggagcagggcaccaagactgtgaggcagaacctggagccgttgttcgagcagtacatcaacaacctcaggaggcagctggacagcatcgtgggggaacggggccgcctggactcagagctgagaaacatgcaggacctggtggaagacttcaagaacaagtatgaggatgaaatcaacaagcgtaccactgctgagaatgagtttgtgatgctgaagaaggatgtagatgctgcctacatgaacaaggtggagctggaggccaaggttgatgcactgatggatgagattaacttcatgaagatgttctttgatgcggagctgtcccagatgcagacgcatgtctctgacacctcagtggtcctctccatggacaacaaccgcaacctggacctggatagcatcatcgctgaggtcaaggcccagtatgaggagattgccaaccgcagccggacagaagccgagtcctggtatcagaccaagtatgaggagctgcagcagacagctggccggcatggcgatgacctccgcaacaccaagcatgagatctctgagatgaaccggatgatccagaggctgagagccgagattgacaatgtcaagaaacagtgcgccaatctgcagaacgccattgcggatgccgagcagcgtggggagctggccctcaaggatgccaggaacaagctggccgagctggaggaggccctgcagaaggccaagcaggacatggcccggctgctgcgtgagtaccaggagctcatgaacaccaagctggccctggacgtggagatcgccacttaccgcaagctgctggagggcgaggaatgcagactcagtggagaaggagttggaccagtcaacatctctgttgtcacaagcagtgtttcctctggatatggcagtggcagtggctatggcggtggcctcggtggaggtcttggcggcggcctcggtggaggtcttgccggaggtagcagtggaagctactactccagcagcagtgggggtgtcggcctaggtggtgggctcagtgtggggggctctggcttcagtgcaagcagtggccgagggctgggggtgggctttggcagtggcgggggtagcagctccagcgtcaaatttgtctccaccacctcctcctcccggaagagcttcaagagctaagaacctgctgcaagtcactgccttccaagtgcagcaacccagcccatggagattgcctcttctaggcagttgctcaagccatgttttatccttttctggagagtagtctagaccaagccaattgcagaaccacattctttggttcccaggagagccccattcccagcccctggtctcccgtgccgcagttctatattctgcttcaaatcagccttcaggtttcccacagcatggcccctgctgacacgagaacccaaagttttcccaaatctaaatcatcaaaacagaatccccaccccaatcccaaattttgttttggttctaactacctccagaatgtgttcaataaaatgcttttataatataatcgacagctctctcgcccagcccagttctggaagggataaaaagggggcatcaccgttcctgggtaacagagccaccttctgcgtcctgctgagctctgttctctccagcacctcccaacccactagtgcctggttctcttgctccaccaggaacaagccaccatgtctcgccagtcaagtgtgtccttccggagcgggggcagtcgtagcttcagcaccgcctctgccatcaccccgtctgtctcccgcaccagcttcacctccgtgtcccggtccgggggtggcggtggtggtggcttcggcagggtcagccttgcgggtgcttgtggagtgggtggctatggcagccggagcctctacaacctggggggctccaagaggatatccatcagcactagtggtggcagcttcaggaaccggtttggtgctggtgctggaggcggctatggctttggaggtggtgccggtagtggatttggtttcggcggtggagctggtggtggctttgggctcggtggcggagctggctttggaggtggcttcggtggccctggctttcctgtctgccctcctggaggtatccaagaggtcactgtcaaccagagtctcctgactcccctcaacctgcaaatcgaccccagcatccagagggtgaggaccgaggagcgcgagcagatcaagaccctcaacaataagtttgcctccttcatcgacaaggtgcggttcctggagcagcagaacaaggttctggacaccaagtggaccctgctgcaggagcagggcaccaagactgtgaggcagaacctggagccgttgttcgagcagtacatcaacaacctcaggaggcagctggacagcatcgtgggggaacggggccgcctggactcagagctgagaaacatgcaggacctggtggaagacttcaagaacaagtatgaggatgaaatcaacaagcgtaccactgctgagaatgagtttgtgatgctgaagaaggatgtagatgctgcctacatgaacaaggtggagctggaggccaaggttgatgcactgatggatgagattaacttcatgaagatgttctttgatgcggagctgtcccagatgcagacgcatgtctctgacacctcagtggtcctctccatggacaacaaccgcaacctggacctggatagcatcatcgctgaggtcaaggcccagtatgaggagattgccaaccgcagccggacagaagccgagtcctggtatcagaccaagtatgaggagctgcagcagacagctggccggcatggcgatgacctccgcaacaccaagcatgagatctctgagatgaaccggatgatccagaggctgagagccgagattgacaatgtcaagaaacagtgcgccaatctgcagaacgccattgcggatgccgagcagcgtggggagctggccctcaaggatgccaggaacaagctggccgagctggaggaggccctgcagaaggccaagcaggacatggcccggctgctgcgtgagtaccaggagctcatgaacaccaagctggccctggacgtggagatcgccacttaccgcaagctgctggagggcgaggaatgcagactcagtggagaaggagttggaccagtcaacatctctgttgtcacaagcagtgtttcctctggatatggcagtggcagtggctatggcggtggcctcggtggaggtcttggcggcggcctcggtggaggtcttgccggaggtagcagtggaagctactactccagcagcagtgggggtgtcggcctaggtggtgggctcagtgtggggggctctggcttcagtgcaagcagtggccgagggctgggggtgggctttggcagtggcgggggtagcagctccagcgtcaaatttgtctccaccacctcctcctcccggaagagcttcaagagctaagaacctgctgcaagtcactgccttccaagtgcagcaacccagcccatggagattgcctcttctaggcagttgctcaagccatgttttatccttttctggagagtagtctagaccaagccaattgcagaaccacattctttggttcccaggagagccccattcccagcccctggtctcccgtgccgcagttctatattctgcttcaaatcagccttcaggtttcccacagcatggcccctgctgacacgagaacccaaagttttcccaaatctaaatcatcaaaacagaatccccaccccaatcccaaattttgttttggttctaactacctccagaatgtgttcaataaaatgcttttataatataatcgacagctctctcgcccagcccagttctggaagggataaaaagggggcatcaccgttcctgggtaacagagccaccttctgcgtcctgctgagctctgttctctccagcacctcccaacccactagtgcctggttctcttgctccaccaggaacaagccaccatgtctcgccagtcaagtgtgtccttccggagcgggggcagtcgtagcttcagcaccgcctctgccatcaccccgtctgtctcccgcaccagcttcacctccgtgtcccggtccgggggtggcggtggtggtggcttcggcagggtcagccttgcgggtgcttgtggagtgggtggctatggcagccggagcctctacaacctggggggctccaagaggatatccatcagcactagtggtggcagcttcaggaaccggtttggtgctggtgctggaggcggctatggctttggaggtggtgccggtagtggatttggtttcggcggtggagctggtggtggctttgggctcggtggcggagctggctttggaggtggcttcggtggccctggctttcctgtctgccctcctggaggtatccaagaggtcactgtcaaccagagtctcctgactcccctcaacctgcaaatcgaccccagcatccagagggtgaggaccgaggagcgcgagcagatcaagaccctcaacaataagtttgcctccttcatcgacaaggtgcggttcctggagcagcagaacaaggttctggacaccaagtggaccctgctgcaggagcagggcaccaagactgtgaggcagaacctggagccgttgttcgagcagtacatcaacaacctcaggaggcagctggacagcatcgtgggggaacggggccgcctggactcagagctgagaaacatgcaggacctggtggaagacttcaagaacaagtatgaggatgaaatcaacaagcgtaccactgctgagaatgagtttgtgatgctgaagaaggatgtagatgctgcctacatgaacaaggtggagctggaggccaaggttgatgcactgatggatgagattaacttcatgaagatgttctttgatgcggagctgtcccagatgcagacgcatgtctctgacacctcagtggtcctctccatggacaacaaccgcaacctggacctggatagcatcatcgctgaggtcaaggcccagtatgaggagattgccaaccgcagccggacagaagccgagtcctggtatcagaccaagtatgaggagctgcagcagacagctggccggcatggcgatgacctccgcaacaccaagcatgagatctctgagatgaaccggatgatccagaggctgagagccgagattgacaatgtcaagaaacagtgcgccaatctgcagaacgccattgcggatgccgagcagcgtggggagctggccctcaaggatgccaggaacaagctggccgagctggaggaggccctgcagaaggccaagcaggacatggcccggctgctgcgtgagtaccaggagctcatgaacaccaagctggccctggacgtggagatcgccacttaccgcaagctgctggagggcgaggaatgcagactcagtggagaaggagttggaccagtcaacatctctgttgtcacaagcagtgtttcctctggatatggcagtggcagtggctatggcggtggcctcggtggaggtcttggcggcggcctcggtggaggtcttgccggaggtagcagtggaagctactactccagcagcagtgggggtgtcggcctaggtggtgggctcagtgtggggggctctggcttcagtgcaagcagtggccgagggctgggggtgggctttggcagtggcgggggtagcagctccagcgtcaaatttgtctccaccacctcctcctcccggaagagcttcaagagctaagaacctgctgcaagtcactgccttccaagtgcagcaacccagcccatggagattgcctcttctaggcagttgctcaagccatgttttatccttttctggagagtagtctagaccaagccaattgcagaaccacattctttggttcccaggagagccccattcccagcccctggtctcccgtgccgcagttctatattctgcttcaaatcagccttcaggtttcccacagcatggcccctgctgacacgagaacccaaagttttcccaaatctaaatcatcaaaacagaatccccaccccaatcccaaattttgttttggttctaactacctccagaatgtgttcaataaaatgcttttataatataatcgacagctctctcgcccagcccagttctggaagggataaaaagggggcatcaccgttcctgggtaacagagccaccttctgcgtcctgctgagctctgttctctccagcacctcccaacccactagtgcctggttctcttgctccaccaggaacaagccaccatgtctcgccagtcaagtgtgtccttccggagcgggggcagtcgtagcttcagcaccgcctctgccatcaccccgtctgtctcccgcaccagcttcacctccgtgtcccggtccgggggtggcggtggtggtggcttcggcagggtcagccttgcgggtgcttgtggagtgggtggctatggcagccggagcctctacaacctggggggctccaagaggatatccatcagcactagtggtggcagcttcaggaaccggtttggtgctggtgctggaggcggctatggctttggaggtggtgccggtagtggatttggtttcggcggtggagctggtggtggctttgggctcggtggcggagctggctttggaggtggcttcggtggccctggctttcctgtctgccctcctggaggtatccaagaggtcactgtcaaccagagtctcctgactcccctcaacctgcaaatcgaccccagcatccagagggtgaggaccgaggagcgcgagcagatcaagaccctcaacaataagtttgcctccttcatcgacaaggtgcggttcctggagcagcagaacaaggttctggacaccaagtggaccctgctgcaggagcagggcaccaagactgtgaggcagaacctggagccgttgttcgagcagtacatcaacaacctcaggaggcagctggacagcatcgtgggggaacggggccgcctggactcagagctgagaaacatgcaggacctggtggaagacttcaagaacaagtatgaggatgaaatcaacaagcgtaccactgctgagaatgagtttgtgatgctgaagaaggatgtagatgctgcctacatgaacaaggtggagctggaggccaaggttgatgcactgatggatgagattaacttcatgaagatgttctttgatgcggagctgtcccagatgcagacgcatgtctctgacacctcagtggtcctctccatggacaacaaccgcaacctggacctggatagcatcatcgctgaggtcaaggcccagtatgaggagattgccaaccgcagccggacagaagccgagtcctggtatcagaccaagtatgaggagctgcagcagacagctggccggcatggcgatgacctccgcaacaccaagcatgagatctctgagatgaaccggatgatccagaggctgagagccgagattgacaatgtcaagaaacagtgcgccaatctgcagaacgccattgcggatgccgagcagcgtggggagctggccctcaaggatgccaggaacaagctggccgagctggaggaggccctgcagaaggccaagcaggacatggcccggctgctgcgtgagtaccaggagctcatgaacaccaagctggccctggacgtggagatcgccacttaccgcaagctgctggagggcgaggaatgcagactcagtggagaaggagttggaccagtcaacatctctgttgtcacaagcagtgtttcctctggatatggcagtggcagtggctatggcggtggcctcggtggaggtcttggcggcggcctcggtggaggtcttgccggaggtagcagtggaagctactactccagcagcagtgggggtgtcggcctaggtggtgggctcagtgtggggggctctggcttcagtgcaagcagtggccgagggctgggggtgggctttggcagtggcgggggtagcagctccagcgtcaaatttgtctccaccacctcctcctcccggaagagcttcaagagctaagaacctgctgcaagtcactgccttccaagtgcagcaacccagcccatggagattgcctcttctaggcagttgctcaagccatgttttatccttttctggagagtagtctagaccaagccaattgcagaaccacattctttggttcccaggagagccccattcccagcccctggtctcccgtgccgcagttctatattctgcttcaaatcagccttcaggtttcccacagcatggcccctgctgacacgagaacccaaagttttcccaaatctaaatcatcaaaacagaatccccaccccaatcccaaattttgttttggttctaactacctccagaatgtgttcaataaaatgcttttataatataatcgacagctctctcgcccagcccagttctggaagggataaaaagggggcatcaccgttcctgggtaacagagccaccttctgcgtcctgctgagctctgttctctccagcacctcccaacccactagtgcctggttctcttgctccaccaggaacaagccaccatgtctcgccagtcaagtgtgtccttccggagcgggggcagtcgtagcttcagcaccgcctctgccatcaccccgtctgtctcccgcaccagcttcacctccgtgtcccggtccgggggtggcggtggtggtggcttcggcagggtcagccttgcgggtgcttgtggagtgggtggctatggcagccggagcctctacaacctggggggctccaagaggatatccatcagcactagtggtggcagcttcaggaaccggtttggtgctggtgctggaggcggctatggctttggaggtggtgccggtagtggatttggtttcggcggtggagctggtggtggctttgggctcggtggcggagctggctttggaggtggcttcggtggccctggctttcctgtctgccctcctggaggtatccaagaggtcactgtcaaccagagtctcctgactcccctcaacctgcaaatcgaccccagcatccagagggtgaggaccgaggagcgcgagcagatcaagaccctcaacaataagtttgcctccttcatcgacaaggtgcggttcctggagcagcagaacaaggttctggacaccaagtggaccctgctgcaggagcagggcaccaagactgtgaggcagaacctggagccgttgttcgagcagtacatcaacaacctcaggaggcagctggacagcatcgtgggggaacggggccgcctggactcagagctgagaaacatgcaggacctggtggaagacttcaagaacaagtatgaggatgaaatcaacaagcgtaccactgctgagaatgagtttgtgatgctgaagaaggatgtagatgctgcctacatgaacaaggtggagctggaggccaaggttgatgcactgatggatgagattaacttcatgaagatgttctttgatgcggagctgtcccagatgcagacgcatgtctctgacacctcagtggtcctctccatggacaacaaccgcaacctggacctggatagcatcatcgctgaggtcaaggcccagtatgaggagattgccaaccgcagccggacagaagccgagtcctggtatcagaccaagtatgaggagctgcagcagacagctggccggcatggcgatgacctccgcaacaccaagcatgagatctctgagatgaaccggatgatccagaggctgagagccgagattgacaatgtcaagaaacagtgcgccaatctgcagaacgccattgcggatgccgagcagcgtggggagctggccctcaaggatgccaggaacaagctggccgagctggaggaggccctgcagaaggccaagcaggacatggcccggctgctgcgtgagtaccaggagctcatgaacaccaagctggccctggacgtggagatcgccacttaccgcaagctgctggagggcgaggaatgcagactcagtggagaaggagttggaccagtcaacatctctgttgtcacaagcagtgtttcctctggatatggcagtggcagtggctatggcggtggcctcggtggaggtcttggcggcggcctcggtggaggtcttgccggaggtagcagtggaagctactactccagcagcagtgggggtgtcggcctaggtggtgggctcagtgtggggggctctggcttcagtgcaagcagtggccgagggctgggggtgggctttggcagtggcgggggtagcagctccagcgtcaaatttgtctccaccacctcctcctcccggaagagcttcaagagctaagaacctgctgcaagtcactgccttccaagtgcagcaacccagcccatggagattgcctcttctaggcagttgctcaagccatgttttatccttttctggagagtagtctagaccaagccaattgcagaaccacattctttggttcccaggagagccccattcccagcccctggtctcccgtgccgcagttctatattctgcttcaaatcagccttcaggtttcccacagcatggcccctgctgacacgagaacccaaagttttcccaaatctaaatcatcaaaacagaatccccaccccaatcccaaattttgttttggttctaactacctccagaatgtgttcaataaaatgcttttataatataatcgacagctctctcgcccagcccagttctggaagggataaaaagggggcatcaccgttcctgggtaacagagccaccttctgcgtcctgctgagctctgttctctccagcacctcccaacccactagtgcctggttctcttgctccaccaggaacaagccaccatgtctcgccagtcaagtgtgtccttccggagcgggggcagtcgtagcttcagcaccgcctctgccatcaccccgtctgtctcccgcaccagcttcacctccgtgtcccggtccgggggtggcggtggtggtggcttcggcagggtcagccttgcgggtgcttgtggagtgggtggctatggcagccggagcctctacaacctggggggctccaagaggatatccatcagcactagtggtggcagcttcaggaaccggtttggtgctggtgctggaggcggctatggctttggaggtggtgccggtagtggatttggtttcggcggtggagctggtggtggctttgggctcggtggcggagctggctttggaggtggcttcggtggccctggctttcctgtctgccctcctggaggtatccaagaggtcactgtcaaccagagtctcctgactcccctcaacctgcaaatcgaccccagcatccagagggtgaggaccgaggagcgcgagcagatcaagaccctcaacaataagtttgcctccttcatcgacaaggtgcggttcctggagcagcagaacaaggttctggacaccaagtggaccctgctgcaggagcagggcaccaagactgtgaggcagaacctggagccgttgttcgagcagtacatcaacaacctcaggaggcagctggacagcatcgtgggggaacggggccgcctggactcagagctgagaaacatgcaggacctggtggaagacttcaagaacaagtatgaggatgaaatcaacaagcgtaccactgctgagaatgagtttgtgatgctgaagaaggatgtagatgctgcctacatgaacaaggtggagctggaggccaaggttgatgcactgatggatgagattaacttcatgaagatgttctttgatgcggagctgtcccagatgcagacgcatgtctctgacacctcagtggtcctctccatggacaacaaccgcaacctggacctggatagcatcatcgctgaggtcaaggcccagtatgaggagattgccaaccgcagccggacagaagccgagtcctggtatcagaccaagtatgaggagctgcagcagacagctggccggcatggcgatgacctccgcaacaccaagcatgagatctctgagatgaaccggatgatccagaggctgagagccgagattgacaatgtcaagaaacagtgcgccaatctgcagaacgccattgcggatgccgagcagcgtggggagctggccctcaaggatgccaggaacaagctggccgagctggaggaggccctgcagaaggccaagcaggacatggcccggctgctgcgtgagtaccaggagctcatgaacaccaagctggccctggacgtggagatcgccacttaccgcaagctgctggagggcgaggaatgcagactcagtggagaaggagttggaccagtcaacatctctgttgtcacaagcagtgtttcctctggatatggcagtggcagtggctatggcggtggcctcggtggaggtcttggcggcggcctcggtggaggtcttgccggaggtagcagtggaagctactactccagcagcagtgggggtgtcggcctaggtggtgggctcagtgtggggggctctggcttcagtgcaagcagtggccgagggctgggggtgggctttggcagtggcgggggtagcagctccagcgtcaaatttgtctccaccacctcctcctcccggaagagcttcaagagctaagaacctgctgcaagtcactgccttccaagtgcagcaacccagcccatggagattgcctcttctaggcagttgctcaagccatgttttatccttttctggagagtagtctagaccaagccaattgcagaaccacattctttggttcccaggagagccccattcccagcccctggtctcccgtgccgcagttctatattctgcttcaaatcagccttcaggtttcccacagcatggcccctgctgacacgagaacccaaagttttcccaaatctaaatcatcaaaacagaatccccaccccaatcccaaattttgttttggttctaactacctccagaatgtgttcaataaaatgcttttataatataatcgacagctctctcgcccagcccagttctggaagggataaaaagggggcatcaccgttcctgggtaacagagccaccttctgcgtcctgctgagctctgttctctccagcacctcccaacccactagtgcctggttctcttgctccaccaggaacaagccaccatgtctcgccagtcaagtgtgtccttccggagcgggggcagtcgtagcttcagcaccgcctctgccatcaccccgtctgtctcccgcaccagcttcacctccgtgtcccggtccgggggtggcggtggtggtggcttcggcagggtcagccttgcgggtgcttgtggagtgggtggctatggcagccggagcctctacaacctggggggctccaagaggatatccatcagcactagtggtggcagcttcaggaaccggtttggtgctggtgctggaggcggctatggctttggaggtggtgccggtagtggatttggtttcggcggtggagctggtggtggctttgggctcggtggcggagctggctttggaggtggcttcggtggccctggctttcctgtctgccctcctggaggtatccaagaggtcactgtcaaccagagtctcctgactcccctcaacctgcaaatcgaccccagcatccagagggtgaggaccgaggagcgcgagcagatcaagaccctcaacaataagtttgcctccttcatcgacaaggtgcggttcctggagcagcagaacaaggttctggacaccaagtggaccctgctgcaggagcagggcaccaagactgtgaggcagaacctggagccgttgttcgagcagtacatcaacaacctcaggaggcagctggacagcatcgtgggggaacggggccgcctggactcagagctgagaaacatgcaggacctggtggaagacttcaagaacaagtatgaggatgaaatcaacaagcgtaccactgctgagaatgagtttgtgatgctgaagaaggatgtagatgctgcctacatgaacaaggtggagctggaggccaaggttgatgcactgatggatgagattaacttcatgaagatgttctttgatgcggagctgtcccagatgcagacgcatgtctctgacacctcagtggtcctctccatggacaacaaccgcaacctggacctggatagcatcatcgctgaggtcaaggcccagtatgaggagattgccaaccgcagccggacagaagccgagtcctggtatcagaccaagtatgaggagctgcagcagacagctggccggcatggcgatgacctccgcaacaccaagcatgagatctctgagatgaaccggatgatccagaggctgagagccgagattgacaatgtcaagaaacagtgcgccaatctgcagaacgccattgcggatgccgagcagcgtggggagctggccctcaaggatgccaggaacaagctggccgagctggaggaggccctgcagaaggccaagcaggacatggcccggctgctgcgtgagtaccaggagctcatgaacaccaagctggccctggacgtggagatcgccacttaccgcaagctgctggagggcgaggaatgcagactcagtggagaaggagttggaccagtcaacatctctgttgtcacaagcagtgtttcctctggatatggcagtggcagtggctatggcggtggcctcggtggaggtcttggcggcggcctcggtggaggtcttgccggaggtagcagtggaagctactactccagcagcagtgggggtgtcggcctaggtggtgggctcagtgtggggggctctggcttcagtgcaagcagtggccgagggctgggggtgggctttggcagtggcgggggtagcagctccagcgtcaaatttgtctccaccacctcctcctcccggaagagcttcaagagctaagaacctgctgcaagtcactgccttccaagtgcagcaacccagcccatggagattgcctcttctaggcagttgctcaagccatgttttatccttttctggagagtagtctagaccaagccaattgcagaaccacattctttggttcccaggagagccccattcccagcccctggtctcccgtgccgcagttctatattctgcttcaaatcagccttcaggtttcccacagcatggcccctgctgacacgagaacccaaagttttcccaaatctaaatcatcaaaacagaatccccaccccaatcccaaattttgttttggttctaactacctccagaatgtgttcaataaaatgcttttataatataatcgacagctctctcgcccagcccagttctggaagggataaaaagggggcatcaccgttcctgggtaacagagccaccttctgcgtcctgctgagctctgttctctccagcacctcccaacccactagtgcctggttctcttgctccaccaggaacaagccaccatgtctcgccagtcaagtgtgtccttccggagcgggggcagtcgtagcttcagcaccgcctctgccatcaccccgtctgtctcccgcaccagcttcacctccgtgtcccggtccgggggtggcggtggtggtggcttcggcagggtcagccttgcgggtgcttgtggagtgggtggctatggcagccggagcctctacaacctggggggctccaagaggatatccatcagcactagtggtggcagcttcaggaaccggtttggtgctggtgctggaggcggctatggctttggaggtggtgccggtagtggatttggtttcggcggtggagctggtggtggctttgggctcggtggcggagctggctttggaggtggcttcggtggccctggctttcctgtctgccctcctggaggtatccaagaggtcactgtcaaccagagtctcctgactcccctcaacctgcaaatcgaccccagcatccagagggtgaggaccgaggagcgcgagcagatcaagaccctcaacaataagtttgcctccttcatcgacaaggtgcggttcctggagcagcagaacaaggttctggacaccaagtggaccctgctgcaggagcagggcaccaagactgtgaggcagaacctggagccgttgttcgagcagtacatcaacaacctcaggaggcagctggacagcatcgtgggggaacggggccgcctggactcagagctgagaaacatgcaggacctggtggaagacttcaagaacaagtatgaggatgaaatcaacaagcgtaccactgctgagaatgagtttgtgatgctgaagaaggatgtagatgctgcctacatgaacaaggtggagctggaggccaaggttgatgcactgatggatgagattaacttcatgaagatgttctttgatgcggagctgtcccagatgcagacgcatgtctctgacacctcagtggtcctctccatggacaacaaccgcaacctggacctggatagcatcatcgctgaggtcaaggcccagtatgaggagattgccaaccgcagccggacagaagccgagtcctggtatcagaccaagtatgaggagctgcagcagacagctggccggcatggcgatgacctccgcaacaccaagcatgagatctctgagatgaaccggatgatccagaggctgagagccgagattgacaatgtcaagaaacagtgcgccaatctgcagaacgccattgcggatgccgagcagcgtggggagctggccctcaaggatgccaggaacaagctggccgagctggaggaggccctgcagaaggccaagcaggacatggcccggctgctgcgtgagtaccaggagctcatgaacaccaagctggccctggacgtggagatcgccacttaccgcaagctgctggagggcgaggaatgcagactcagtggagaaggagttggaccagtcaacatctctgttgtcacaagcagtgtttcctctggatatggcagtggcagtggctatggcggtggcctcggtggaggtcttggcggcggcctcggtggaggtcttgccggaggtagcagtggaagctactactccagcagcagtgggggtgtcggcctaggtggtgggctcagtgtggggggctctggcttcagtgcaagcagtggccgagggctgggggtgggctttggcagtggcgggggtagcagctccagcgtcaaatttgtctccaccacctcctcctcccggaagagcttcaagagctaagaacctgctgcaagtcactgccttccaagtgcagcaacccagcccatggagattgcctcttctaggcagttgctcaagccatgttttatccttttctggagagtagtctagaccaagccaattgcagaaccacattctttggttcccaggagagccccattcccagcccctggtctcccgtgccgcagttctatattctgcttcaaatcagccttcaggtttcccacagcatggcccctgctgacacgagaacccaaagttttcccaaatctaaatcatcaaaacagaatccccaccccaatcccaaattttgttttggttctaactacctccagaatgtgttcaataaaatgcttttataatataatcgacagctctctcgcccagcccagttctggaagggataaaaagggggcatcaccgttcctgggtaacagagccaccttctgcgtcctgctgagctctgttctctccagcacctcccaacccactagtgcctggttctcttgctccaccaggaacaagccaccatgtctcgccagtcaagtgtgtccttccggagcgggggcagtcgtagcttcagcaccgcctctgccatcaccccgtctgtctcccgcaccagcttcacctccgtgtcccggtccgggggtggcggtggtggtggcttcggcagggtcagccttgcgggtgcttgtggagtgggtggctatggcagccggagcctctacaacctggggggctccaagaggatatccatcagcactagtggtggcagcttcaggaaccggtttggtgctggtgctggaggcggctatggctttggaggtggtgccggtagtggatttggtttcggcggtggagctggtggtggctttgggctcggtggcggagctggctttggaggtggcttcggtggccctggctttcctgtctgccctcctggaggtatccaagaggtcactgtcaaccagagtctcctgactcccctcaacctgcaaatcgaccccagcatccagagggtgaggaccgaggagcgcgagcagatcaagaccctcaacaataagtttgcctccttcatcgacaaggtgcggttcctggagcagcagaacaaggttctggacaccaagtggaccctgctgcaggagcagggcaccaagactgtgaggcagaacctggagccgttgttcgagcagtacatcaacaacctcaggaggcagctggacagcatcgtgggggaacggggccgcctggactcagagctgagaaacatgcaggacctggtggaagacttcaagaacaagtatgaggatgaaatcaacaagcgtaccactgctgagaatgagtttgtgatgctgaagaaggatgtagatgctgcctacatgaacaaggtggagctggaggccaaggttgatgcactgatggatgagattaacttcatgaagatgttctttgatgcggagctgtcccagatgcagacgcatgtctctgacacctcagtggtcctctccatggacaacaaccgcaacctggacctggatagcatcatcgctgaggtcaaggcccagtatgaggagattgccaaccgcagccggacagaagccgagtcctggtatcagaccaagtatgaggagctgcagcagacagctggccggcatggcgatgacctccgcaacaccaagcatgagatctctgagatgaaccggatgatccagaggctgagagccgagattgacaatgtcaagaaacagtgcgccaatctgcagaacgccattgcggatgccgagcagcgtggggagctggccctcaaggatgccaggaacaagctggccgagctggaggaggccctgcagaaggccaagcaggacatggcccggctgctgcgtgagtaccaggagctcatgaacaccaagctggccctggacgtggagatcgccacttaccgcaagctgctggagggcgaggaatgcagactcagtggagaaggagttggaccagtcaacatctctgttgtcacaagcagtgtttcctctggatatggcagtggcagtggctatggcggtggcctcggtggaggtcttggcggcggcctcggtggaggtcttgccggaggtagcagtggaagctactactccagcagcagtgggggtgtcggcctaggtggtgggctcagtgtggggggctctggcttcagtgcaagcagtggccgagggctgggggtgggctttggcagtggcgggggtagcagctccagcgtcaaatttgtctccaccacctcctcctcccggaagagcttcaagagctaagaacctgctgcaagtcactgccttccaagtgcagcaacccagcccatggagattgcctcttctaggcagttgctcaagccatgttttatccttttctggagagtagtctagaccaagccaattgcagaaccacattctttggttcccaggagagccccattcccagcccctggtctcccgtgccgcagttctatattctgcttcaaatcagccttcaggtttcccacagcatggcccctgctgacacgagaacccaaagttttcccaaatctaaatcatcaaaacagaatccccaccccaatcccaaattttgttttggttctaactacctccagaatgtgttcaataaaatgcttttataatataatcgacagctctctcgcccagcccagttctggaagggataaaaagggggcatcaccgttcctgggtaacagagccaccttctgcgtcctgctgagctctgttctctccagcacctcccaacccactagtgcctggttctcttgctccaccaggaacaagccaccatgtctcgccagtcaagtgtgtccttccggagcgggggcagtcgtagcttcagcaccgcctctgccatcaccccgtctgtctcccgcaccagcttcacctccgtgtcccggtccgggggtggcggtggtggtggcttcggcagggtcagccttgcgggtgcttgtggagtgggtggctatggcagccggagcctctacaacctggggggctccaagaggatatccatcagcactagtggtggcagcttcaggaaccggtttggtgctggtgctggaggcggctatggctttggaggtggtgccggtagtggatttggtttcggcggtggagctggtggtggctttgggctcggtggcggagctggctttggaggtggcttcggtggccctggctttcctgtctgccctcctggaggtatccaagaggtcactgtcaaccagagtctcctgactcccctcaacctgcaaatcgaccccagcatccagagggtgaggaccgaggagcgcgagcagatcaagaccctcaacaataagtttgcctccttcatcgacaaggtgcggttcctggagcagcagaacaaggttctggacaccaagtggaccctgctgcaggagcagggcaccaagactgtgaggcagaacctggagccgttgttcgagcagtacatcaacaacctcaggaggcagctggacagcatcgtgggggaacggggccgcctggactcagagctgagaaacatgcaggacctggtggaagacttcaagaacaagtatgaggatgaaatcaacaagcgtaccactgctgagaatgagtttgtgatgctgaagaaggatgtagatgctgcctacatgaacaaggtggagctggaggccaaggttgatgcactgatggatgagattaacttcatgaagatgttctttgatgcggagctgtcccagatgcagacgcatgtctctgacacctcagtggtcctctccatggacaacaaccgcaacctggacctggatagcatcatcgctgaggtcaaggcccagtatgaggagattgccaaccgcagccggacagaagccgagtcctggtatcagaccaagtatgaggagctgcagcagacagctggccggcatggcgatgacctccgcaacaccaagcatgagatctctgagatgaaccggatgatccagaggctgagagccgagattgacaatgtcaagaaacagtgcgccaatctgcagaacgccattgcggatgccgagcagcgtggggagctggccctcaaggatgccaggaacaagctggccgagctggaggaggccctgcagaaggccaagcaggacatggcccggctgctgcgtgagtaccaggagctcatgaacaccaagctggccctggacgtggagatcgccacttaccgcaagctgctggagggcgaggaatgcagactcagtggagaaggagttggaccagtcaacatctctgttgtcacaagcagtgtttcctctggatatggcagtggcagtggctatggcggtggcctcggtggaggtcttggcggcggcctcggtggaggtcttgccggaggtagcagtggaagctactactccagcagcagtgggggtgtcggcctaggtggtgggctcagtgtggggggctctggcttcagtgcaagcagtggccgagggctgggggtgggctttggcagtggcgggggtagcagctccagcgtcaaatttgtctccaccacctcctcctcccggaagagcttcaagagctaagaacctgctgcaagtcactgccttccaagtgcagcaacccagcccatggagattgcctcttctaggcagttgctcaagccatgttttatccttttctggagagtagtctagaccaagccaattgcagaaccacattctttggttcccaggagagccccattcccagcccctggtctcccgtgccgcagttctatattctgcttcaaatcagccttcaggtttcccacagcatggcccctgctgacacgagaacccaaagttttcccaaatctaaatcatcaaaacagaatccccaccccaatcccaaattttgttttggttctaactacctccagaatgtgttcaataaaatgcttttataatataatcgacagctctctcgcccagcccagttctggaagggataaaaagggggcatcaccgttcctgggtaacagagccaccttctgcgtcctgctgagctctgttctctccagcacctcccaacccactagtgcctggttctcttgctccaccaggaacaagccaccatgtctcgccagtcaagtgtgtccttccggagcgggggcagtcgtagcttcagcaccgcctctgccatcaccccgtctgtctcccgcaccagcttcacctccgtgtcccggtccgggggtggcggtggtggtggcttcggcagggtcagccttgcgggtgcttgtggagtgggtggctatggcagccggagcctctacaacctggggggctccaagaggatatccatcagcactagtggtggcagcttcaggaaccggtttggtgctggtgctggaggcggctatggctttggaggtggtgccggtagtggatttggtttcggcggtggagctggtggtggctttgggctcggtggcggagctggctttggagg

SEQ ID NO: 998 - DNA, 32765 bp, Homo sapiens
  misc_feature (443)..(443): second gene starts at position 443
cttgccgcgctgcactccaccacgcctcctccaagtcccagcgaacccgcgtgcaacctgtcccgactctagccgcctcttcagctcgccatggatcccaactgctcctgcgccgccggtgactcctgcacctgcgccggctcctgcaaatgcaaagagtgcaaatgcacctcctgcaagaaaagctgctgctcctgctgccctgtgggctgtgccaagtgtgcccagggctgcatctgcaaaggggcgtcggacaagtgcagctgctgcgcctgatgctgggacagccccgctcccagatgtaaagaacgcgacttccacaaacctggattttttatgtacaaccctgaccgtgaccgtttgctatattcctttttctatgaaataatgtgaatgataataaaacagctttgacttgcttgccgcgctgcactccaccacgtggaggcggctatggctttggaggtggtgccggtagtggatttggtttcggcggtggagctggtggtggctttgggctcggtggcggagctggctttggaggtggcttcggtggccctggctttcctgtctgccctcctggaggtatccaagaggtcactgtcaaccagagtctcctgactcccctcaacctgcaaatcgaccccagcatccagagggtgaggaccgaggagcgcgagcagatcaagaccctcaacaataagtttgcctccttcatcgacaaggtgcggttcctggagcagcagaacaaggttctggacaccaagtggaccctgctgcaggagcagggcaccaagactgtgaggcagaacctggagccgttgttcgagcagtacatcaacaacctcaggaggcagctggacagcatcgtgggggaacggggccgcctggactcagagctgagaaacatgcaggacctggtggaagacttcaagaacaagtatgaggatgaaatcaacaagcgtaccactgctgagaatgagtttgtgatgctgaagaaggatgtagatgctgcctacatgaacaaggtggagctggaggccaaggttgatgcactgatggatgagattaacttcatgaagatgttctttgatgcggagctgtcccagatgcagacgcatgtctctgacacctcagtggtcctctccatggacaacaaccgcaacctggacctggatagcatcatcgctgaggtcaaggcccagtatgaggagattgccaaccgcagccggacagaagccgagtcctggtatcagaccaagtatgaggagctgcagcagacagctggccggcatggcgatgacctccgcaacaccaagcatgagatctctgagatgaaccggatgatccagaggctgagagccgagattgacaatgtcaagaaacagtgcgccaatctgcagaacgccattgcggatgccgagcagcgtggggagctggccctcaaggatgccaggaacaagctggccgagctggaggaggccctgcagaaggccaagcaggacatggcccggctgctgcgtgagtaccaggagctcatgaacaccaagctggccctggacgtggagatcgccacttaccgcaagctgctggagggcgaggaatgcagactcagtggagaaggagttggaccagtcaacatctctgttgtcacaagcagtgtttcctctggatatggcagtggcagtggctatggcggtggcctcggtggaggtcttggcggcggcctcggtggaggtcttgccggaggtagcagtggaagctactactccagcagcagtgggggtgtcggcctaggtggtgggctcagtgtggggggctctggcttcagtgcaagcagtggccgagggctgggggtgggctttggcagtggcgggggtagcagctccagcgtcaaatttgtctccaccacctcctcctcccggaagagcttcaagagctaagaacctgctgcaagtcactgccttccaagtgcagcaacccagcccatggagattgcctcttctaggcagttgctcaagccatgttttatccttttctggagagtagtctagaccaagccaattgcagaaccacattctttggttcccaggagagccccattcccagcccctggtctcccgtgccgcagttctatattctgcttcaaatcagccttcaggtttcccacagcatggcccctgctgacacgagaacccaaagttttcccaaatctaaatcatcaaaacagaatccccaccccaatcccaaattttgttttggttctaactacctccagaatgtgttcaataaaatgcttttataatataatcgacagctctctcgcccagcccagttctggaagggataaaaagggggcatcaccgttcctgggtaacagagccaccttctgcgtcctgctgagctctgttctctccagcacctcccaacccactagtgcctggttctcttgctccaccaggaacaagccaccatgtctcgccagtcaagtgtgtccttccggagcgggggcagtcgtagcttcagcaccgcctctgccatcaccccgtctgtctcccgcaccagcttcacctccgtgtcccggtccgggggtggcggtggtggtggcttcggcagggtcagccttgcgggtgcttgtggagtgggtggctatggcagccggagcctctacaacctggggggctccaagaggatatccatcagcactagtggtggcagcttcaggaaccggtttggtgctggtgctggaggcggctatggctttggaggtggtgccggtagtggatttggtttcggcggtggagctggtggtggctttgggctcggtggcggagctggctttggaggtggcttcggtggccctggctttcctgtctgccctcctggaggtatccaagaggtcactgtcaaccagagtctcctgactcccctcaacctgcaaatcgaccccagcatccagagggtgaggaccgaggagcgcgagcagatcaagaccctcaacaataagtttgcctccttcatcgacaaggtgcggttcctggagcagcagaacaaggttctggacaccaagtggaccctgctgcaggagcagggcaccaagactgtgaggcagaacctggagccgttgttcgagcagtacatcaacaacctcaggaggcagctggacagcatcgtgggggaacggggccgcctggactcagagctgagaaacatgcaggacctggtggaagacttcaagaacaagtatgaggatgaaatcaacaagcgtaccactgctgagaatgagtttgtgatgctgaagaaggatgtagatgctgcctacatgaacaaggtggagctggaggccaaggttgatgcactgatggatgagattaacttcatgaagatgttctttgatgcggagctgtcccagatgcagacgcatgtctctgacacctcagtggtcctctccatggacaacaaccgcaacctggacctggatagcatcatcgctgaggtcaaggcccagtatgaggagattgccaaccgcagccggacagaagccgagtcctggtatcagaccaagtatgaggagctgcagcagacagctggccggcatggcgatgacctccgcaacaccaagcatgagatctctgagatgaaccggatgatccagaggctgagagccgagattgacaatgtcaagaaacagtgcgccaatctgcagaacgccattgcggatgccgagcagcgtggggagctggccctcaaggatgccaggaacaagctggccgagctggaggaggccctgcagaaggccaagcaggacatggcccggctgctgcgtgagtaccaggagctcatgaacaccaagctggccctggacgtggagatcgccacttaccgcaagctgctggagggcgaggaatgcagactcagtggagaaggagttggaccagtcaacatctctgttgtcacaagcagtgtttcctctggatatggcagtggcagtggctatggcggtggcctcggtggaggtcttggcggcggcctcggtggaggtcttgccggaggtagcagtggaagctactactccagcagcagtgggggtgtcggcctaggtggtgggctcagtgtggggggctctggcttcagtgcaagcagtggccgagggctgggggtgggctttggcagtggcgggggtagcagctccagcgtcaaatttgtctccaccacctcctcctcccggaagagcttcaagagctaagaacctgctgcaagtcactgccttccaagtgcagcaacccagcccatggagattgcctcttctaggcagttgctcaagccatgttttatccttttctggagagtagtctagaccaagccaattgcagaaccacattctttggttcccaggagagccccattcccagcccctggtctcccgtgccgcagttctatattctgcttcaaatcagccttcaggtttcccacagcatggcccctgctgacacgagaacccaaagttttcccaaatctaaatcatcaaaacagaatccccaccccaatcccaaattttgttttggttctaactacctccagaatgtgttcaataaaatgcttttataatataatcgacagctctctcgcccagcccagttctggaagggataaaaagggggcatcaccgttcctgggtaacagagccaccttctgcgtcctgctgagctctgttctctccagcacctcccaacccactagtgcctggttctcttgctccaccaggaacaagccaccatgtctcgccagtcaagtgtgtccttccggagcgggggcagtcgtagcttcagcaccgcctctgccatcaccccgtctgtctcccgcaccagcttcacctccgtgtcccggtccgggggtggcggtggtggtggcttcggcagggtcagccttgcgggtgcttgtggagtgggtggctatggcagccggagcctctacaacctggggggctccaagaggatatccatcagcactagtggtggcagcttcaggaaccggtttggtgctggtgctggaggcggctatggctttggaggtggtgccggtagtggatttggtttcggcggtggagctggtggtggctttgggctcggtggcggagctggctttggaggtggcttcggtggccctggctttcctgtctgccctcctggaggtatccaagaggtcactgtcaaccagagtctcctgactcccctcaacctgcaaatcgaccccagcatccagagggtgaggaccgaggagcgcgagcagatcaagaccctcaacaataagtttgcctccttcatcgacaaggtgcggttcctggagcagcagaacaaggttctggacaccaagtggaccctgctgcaggagcagggcaccaagactgtgaggcagaacctggagccgttgttcgagcagtacatcaacaacctcaggaggcagctggacagcatcgtgggggaacggggccgcctggactcagagctgagaaacatgcaggacctggtggaagacttcaagaacaagtatgaggatgaaatcaacaagcgtaccactgctgagaatgagtttgtgatgctgaagaaggatgtagatgctgcctacatgaacaaggtggagctggaggccaaggttgatgcactgatggatgagattaacttcatgaagatgttctttgatgcggagctgtcccagatgcagacgcatgtctctgacacctcagtggtcctctccatggacaacaaccgcaacctggacctggatagcatcatcgctgaggtcaaggcccagtatgaggagattgccaaccgcagccggacagaagccgagtcctggtatcagaccaagtatgaggagctgcagcagacagctggccggcatggcgatgacctccgcaacaccaagcatgagatctctgagatgaaccggatgatccagaggctgagagccgagattgacaatgtcaagaaacagtgcgccaatctgcagaacgccattgcggatgccgagcagcgtggggagctggccctcaaggatgccaggaacaagctggccgagctggaggaggccctgcagaaggccaagcaggacatggcccggctgctgcgtgagtaccaggagctcatgaacaccaagctggccctggacgtggagatcgccacttaccgcaagctgctggagggcgaggaatgcagactcagtggagaaggagttggaccagtcaacatctctgttgtcacaagcagtgtttcctctggatatggcagtggcagtggctatggcggtggcctcggtggaggtcttggcggcggcctcggtggaggtcttgccggaggtagcagtggaagctactactccagcagcagtgggggtgtcggcctaggtggtgggctcagtgtggggggctctggcttcagtgcaagcagtggccgagggctgggggtgggctttggcagtggcgggggtagcagctccagcgtcaaatttgtctccaccacctcctcctcccggaagagcttcaagagctaagaacctgctgcaagtcactgccttccaagtgcagcaacccagcccatggagattgcctcttctaggcagttgctcaagccatgttttatccttttctggagagtagtctagaccaagccaattgcagaaccacattctttggttcccaggagagccccattcccagcccctggtctcccgtgccgcagttctatattctgcttcaaatcagccttcaggtttcccacagcatggcccctgctgacacgagaacccaaagttttcccaaatctaaatcatcaaaacagaatccccaccccaatcccaaattttgttttggttctaactacctccagaatgtgttcaataaaatgcttttataatataatcgacagctctctcgcccagcccagttctggaagggataaaaagggggcatcaccgttcctgggtaacagagccaccttctgcgtcctgctgagctctgttctctccagcacctcccaacccactagtgcctggttctcttgctccaccaggaacaagccaccatgtctcgccagtcaagtgtgtccttccggagcgggggcagtcgtagcttcagcaccgcctctgccatcaccccgtctgtctcccgcaccagcttcacctccgtgtcccggtccgggggtggcggtggtggtggcttcggcagggtcagccttgcgggtgcttgtggagtgggtggctatggcagccggagcctctacaacctggggggctccaagaggatatccatcagcactagtggtggcagcttcaggaaccggtttggtgctggtgctggaggcggctatggctttggaggtggtgccggtagtggatttggtttcggcggtggagctggtggtggctttgggctcggtggcggagctggctttggaggtggcttcggtggccctggctttcctgtctgccctcctggaggtatccaagaggtcactgtcaaccagagtctcctgactcccctcaacctgcaaatcgaccccagcatccagagggtgaggaccgaggagcgcgagcagatcaagaccctcaacaataagtttgcctccttcatcgacaaggtgcggttcctggagcagcagaacaaggttctggacaccaagtggaccctgctgcaggagcagggcaccaagactgtgaggcagaacctggagccgttgttcgagcagtacatcaacaacctcaggaggcagctggacagcatcgtgggggaacggggccgcctggactcagagctgagaaacatgcaggacctggtggaagacttcaagaacaagtatgaggatgaaatcaacaagcgtaccactgctgagaatgagtttgtgatgctgaagaaggatgtagatgctgcctacatgaacaaggtggagctggaggccaaggttgatgcactgatggatgagattaacttcatgaagatgttctttgatgcggagctgtcccagatgcagacgcatgtctctgacacctcagtggtcctctccatggacaacaaccgcaacctggacctggatagcatcatcgctgaggtcaaggcccagtatgaggagattgccaaccgcagccggacagaagccgagtcctggtatcagaccaagtatgaggagctgcagcagacagctggccggcatggcgatgacctccgcaacaccaagcatgagatctctgagatgaaccggatgatccagaggctgagagccgagattgacaatgtcaagaaacagtgcgccaatctgcagaacgccattgcggatgccgagcagcgtggggagctggccctcaaggatgccaggaacaagctggccgagctggaggaggccctgcagaaggccaagcaggacatggcccggctgctgcgtgagtaccaggagctcatgaacaccaagctggccctggacgtggagatcgccacttaccgcaagctgctggagggcgaggaatgcagactcagtggagaaggagttggaccagtcaacatctctgttgtcacaagcagtgtttcctctggatatggcagtggcagtggctatggcggtggcctcggtggaggtcttggcggcggcctcggtggaggtcttgccggaggtagcagtggaagctactactccagcagcagtgggggtgtcggcctaggtggtgggctcagtgtggggggctctggcttcagtgcaagcagtggccgagggctgggggtgggctttggcagtggcgggggtagcagctccagcgtcaaatttgtctccaccacctcctcctcccggaagagcttcaagagctaagaacctgctgcaagtcactgccttccaagtgcagcaacccagcccatggagattgcctcttctaggcagttgctcaagccatgttttatccttttctggagagtagtctagaccaagccaattgcagaaccacattctttggttcccaggagagccccattcccagcccctggtctcccgtgccgcagttctatattctgcttcaaatcagccttcaggtttcccacagcatggcccctgctgacacgagaacccaaagttttcccaaatctaaatcatcaaaacagaatccccaccccaatcccaaattttgttttggttctaactacctccagaatgtgttcaataaaatgcttttataatataatcgacagctctctcgcccagcccagttctggaagggataaaaagggggcatcaccgttcctgggtaacagagccaccttctgcgtcctgctgagctctgttctctccagcacctcccaacccactagtgcctggttctcttgctccaccaggaacaagccaccatgtctcgccagtcaagtgtgtccttccggagcgggggcagtcgtagcttcagcaccgcctctgccatcaccccgtctgtctcccgcaccagcttcacctccgtgtcccggtccgggggtggcggtggtggtggcttcggcagggtcagccttgcgggtgcttgtggagtgggtggctatggcagccggagcctctacaacctggggggctccaagaggatatccatcagcactagtggtggcagcttcaggaaccggtttggtgctggtgctggaggcggctatggctttggaggtggtgccggtagtggatttggtttcggcggtggagctggtggtggctttgggctcggtggcggagctggctttggaggtggcttcggtggccctggctttcctgtctgccctcctggaggtatccaagaggtcactgtcaaccagagtctcctgactcccctcaacctgcaaatcgaccccagcatccagagggtgaggaccgaggagcgcgagcagatcaagaccctcaacaataagtttgcctccttcatcgacaaggtgcggttcctggagcagcagaacaaggttctggacaccaagtggaccctgctgcaggagcagggcaccaagactgtgaggcagaacctggagccgttgttcgagcagtacatcaacaacctcaggaggcagctggacagcatcgtgggggaacggggccgcctggactcagagctgagaaacatgcaggacctggtggaagacttcaagaacaagtatgaggatgaaatcaacaagcgtaccactgctgagaatgagtttgtgatgctgaagaaggatgtagatgctgcctacatgaacaaggtggagctggaggccaaggttgatgcactgatggatgagattaacttcatgaagatgttctttgatgcggagctgtcccagatgcagacgcatgtctctgacacctcagtggtcctctccatggacaacaaccgcaacctggacctggatagcatcatcgctgaggtcaaggcccagtatgaggagattgccaaccgcagccggacagaagccgagtcctggtatcagaccaagtatgaggagctgcagcagacagctggccggcatggcgatgacctccgcaacaccaagcatgagatctctgagatgaaccggatgatccagaggctgagagccgagattgacaatgtcaagaaacagtgcgccaatctgcagaacgccattgcggatgccgagcagcgtggggagctggccctcaaggatgccaggaacaagctggccgagctggaggaggccctgcagaaggccaagcaggacatggcccggctgctgcgtgagtaccaggagctcatgaacaccaagctggccctggacgtggagatcgccacttaccgcaagctgctggagggcgaggaatgcagactcagtggagaaggagttggaccagtcaacatctctgttgtcacaagcagtgtttcctctggatatggcagtggcagtggctatggcggtggcctcggtggaggtcttggcggcggcctcggtggaggtcttgccggaggtagcagtggaagctactactccagcagcagtgggggtgtcggcctaggtggtgggctcagtgtggggggctctggcttcagtgcaagcagtggccgagggctgggggtgggctttggcagtggcgggggtagcagctccagcgtcaaatttgtctccaccacctcctcctcccggaagagcttcaagagctaagaacctgctgcaagtcactgccttccaagtgcagcaacccagcccatggagattgcctcttctaggcagttgctcaagccatgttttatccttttctggagagtagtctagaccaagccaattgcagaaccacattctttggttcccaggagagccccattcccagcccctggtctcccgtgccgcagttctatattctgcttcaaatcagccttcaggtttcccacagcatggcccctgctgacacgagaacccaaagttttcccaaatctaaatcatcaaaacagaatccccaccccaatcccaaattttgttttggttctaactacctccagaatgtgttcaataaaatgcttttataatataatcgacagctctctcgcccagcccagttctggaagggataaaaagggggcatcaccgttcctgggtaacagagccaccttctgcgtcctgctgagctctgttctctccagcacctcccaacccactagtgcctggttctcttgctccaccaggaacaagccaccatgtctcgccagtcaagtgtgtccttccggagcgggggcagtcgtagcttcagcaccgcctctgccatcaccccgtctgtctcccgcaccagcttcacctccgtgtcccggtccgggggtggcggtggtggtggcttcggcagggtcagccttgcgggtgcttgtggagtgggtggctatggcagccggagcctctacaacctggggggctccaagaggatatccatcagcactagtggtggcagcttcaggaaccggtttggtgctggtgctggaggcggctatggctttggaggtggtgccggtagtggatttggtttcggcggtggagctggtggtggctttgggctcggtggcggagctggctttggaggtggcttcggtggccctggctttcctgtctgccctcctggaggtatccaagaggtcactgtcaaccagagtctcctgactcccctcaacctgcaaatcgaccccagcatccagagggtgaggaccgaggagcgcgagcagatcaagaccctcaacaataagtttgcctccttcatcgacaaggtgcggttcctggagcagcagaacaaggttctggacaccaagtggaccctgctgcaggagcagggcaccaagactgtgaggcagaacctggagccgttgttcgagcagtacatcaacaacctcaggaggcagctggacagcatcgtgggggaacggggccgcctggactcagagctgagaaacatgcaggacctggtggaagacttcaagaacaagtatgaggatgaaatcaacaagcgtaccactgctgagaatgagtttgtgatgctgaagaaggatgtagatgctgcctacatgaacaaggtggagctggaggccaaggttgatgcactgatggatgagattaacttcatgaagatgttctttgatgcggagctgtcccagatgcagacgcatgtctctgacacctcagtggtcctctccatggacaacaaccgcaacctggacctggatagcatcatcgctgaggtcaaggcccagtatgaggagattgccaaccgcagccggacagaagccgagtcctggtatcagaccaagtatgaggagctgcagcagacagctggccggcatggcgatgacctccgcaacaccaagcatgagatctctgagatgaaccggatgatccagaggctgagagccgagattgacaatgtcaagaaacagtgcgccaatctgcagaacgccattgcggatgccgagcagcgtggggagctggccctcaaggatgccaggaacaagctggccgagctggaggaggccctgcagaaggccaagcaggacatggcccggctgctgcgtgagtaccaggagctcatgaacaccaagctggccctggacgtggagatcgccacttaccgcaagctgctggagggcgaggaatgcagactcagtggagaaggagttggaccagtcaacatctctgttgtcacaagcagtgtttcctctggatatggcagtggcagtggctatggcggtggcctcggtggaggtcttggcggcggcctcggtggaggtcttgccggaggtagcagtggaagctactactccagcagcagtgggggtgtcggcctaggtggtgggctcagtgtggggggctctggcttcagtgcaagcagtggccgagggctgggggtgggctttggcagtggcgggggtagcagctccagcgtcaaatttgtctccaccacctcctcctcccggaagagcttcaagagctaagaacctgctgcaagtcactgccttccaagtgcagcaacccagcccatggagattgcctcttctaggcagttgctcaagccatgttttatccttttctggagagtagtctagaccaagccaattgcagaaccacattctttggttcccaggagagccccattcccagcccctggtctcccgtgccgcagttctatattctgcttcaaatcagccttcaggtttcccacagcatggcccctgctgacacgagaacccaaagttttcccaaatctaaatcatcaaaacagaatccccaccccaatcccaaattttgttttggttctaactacctccagaatgtgttcaataaaatgcttttataatataatcgacagctctctcgcccagcccagttctggaagggataaaaagggggcatcaccgttcctgggtaacagagccaccttctgcgtcctgctgagctctgttctctccagcacctcccaacccactagtgcctggttctcttgctccaccaggaacaagccaccatgtctcgccagtcaagtgtgtccttccggagcgggggcagtcgtagcttcagcaccgcctctgccatcaccccgtctgtctcccgcaccagcttcacctccgtgtcccggtccgggggtggcggtggtggtggcttcggcagggtcagccttgcgggtgcttgtggagtgggtggctatggcagccggagcctctacaacctggggggctccaagaggatatccatcagcactagtggtggcagcttcaggaaccggtttggtgctggtgctggaggcggctatggctttggaggtggtgccggtagtggatttggtttcggcggtggagctggtggtggctttgggctcggtggcggagctggctttggaggtggcttcggtggccctggctttcctgtctgccctcctggaggtatccaagaggtcactgtcaaccagagtctcctgactcccctcaacctgcaaatcgaccccagcatccagagggtgaggaccgaggagcgcgagcagatcaagaccctcaacaataagtttgcctccttcatcgacaaggtgcggttcctggagcagcagaacaaggttctggacaccaagtggaccctgctgcaggagcagggcaccaagactgtgaggcagaacctggagccgttgttcgagcagtacatcaacaacctcaggaggcagctggacagcatcgtgggggaacggggccgcctggactcagagctgagaaacatgcaggacctggtggaagacttcaagaacaagtatgaggatgaaatcaacaagcgtaccactgctgagaatgagtttgtgatgctgaagaaggatgtagatgctgcctacatgaacaaggtggagctggaggccaaggttgatgcactgatggatgagattaacttcatgaagatgttctttgatgcggagctgtcccagatgcagacgcatgtctctgacacctcagtggtcctctccatggacaacaaccgcaacctggacctggatagcatcatcgctgaggtcaaggcccagtatgaggagattgccaaccgcagccggacagaagccgagtcctggtatcagaccaagtatgaggagctgcagcagacagctggccggcatggcgatgacctccgcaacaccaagcatgagatctctgagatgaaccggatgatccagaggctgagagccgagattgacaatgtcaagaaacagtgcgccaatctgcagaacgccattgcggatgccgagcagcgtggggagctggccctcaaggatgccaggaacaagctggccgagctggaggaggccctgcagaaggccaagcaggacatggcccggctgctgcgtgagtaccaggagctcatgaacaccaagctggccctggacgtggagatcgccacttaccgcaagctgctggagggcgaggaatgcagactcagtggagaaggagttggaccagtcaacatctctgttgtcacaagcagtgtttcctctggatatggcagtggcagtggctatggcggtggcctcggtggaggtcttggcggcggcctcggtggaggtcttgccggaggtagcagtggaagctactactccagcagcagtgggggtgtcggcctaggtggtgggctcagtgtggggggctctggcttcagtgcaagcagtggccgagggctgggggtgggctttggcagtggcgggggtagcagctccagcgtcaaatttgtctccaccacctcctcctcccggaagagcttcaagagctaagaacctgctgcaagtcactgccttccaagtgcagcaacccagcccatggagattgcctcttctaggcagttgctcaagccatgttttatccttttctggagagtagtctagaccaagccaattgcagaaccacattctttggttcccaggagagccccattcccagcccctggtctcccgtgccgcagttctatattctgcttcaaatcagccttcaggtttcccacagcatggcccctgctgacacgagaacccaaagttttcccaaatctaaatcatcaaaacagaatccccaccccaatcccaaattttgttttggttctaactacctccagaatgtgttcaataaaatgcttttataatataatcgacagctctctcgcccagcccagttctggaagggataaaaagggggcatcaccgttcctgggtaacagagccaccttctgcgtcctgctgagctctgttctctccagcacctcccaacccactagtgcctggttctcttgctccaccaggaacaagccaccatgtctcgccagtcaagtgtgtccttccggagcgggggcagtcgtagcttcagcaccgcctctgccatcaccccgtctgtctcccgcaccagcttcacctccgtgtcccggtccgggggtggcggtggtggtggcttcggcagggtcagccttgcgggtgcttgtggagtgggtggctatggcagccggagcctctacaacctggggggctccaagaggatatccatcagcactagtggtggcagcttcaggaaccggtttggtgctggtgctggaggcggctatggctttggaggtggtgccggtagtggatttggtttcggcggtggagctggtggtggctttgggctcggtggcggagctggctttggaggtggcttcggtggccctggctttcctgtctgccctcctggaggtatccaagaggtcactgtcaaccagagtctcctgactcccctcaacctgcaaatcgaccccagcatccagagggtgaggaccgaggagcgcgagcagatcaagaccctcaacaataagtttgcctccttcatcgacaaggtgcggttcctggagcagcagaacaaggttctggacaccaagtggaccctgctgcaggagcagggcaccaagactgtgaggcagaacctggagccgttgttcgagcagtacatcaacaacctcaggaggcagctggacagcatcgtgggggaacggggccgcctggactcagagctgagaaacatgcaggacctggtggaagacttcaagaacaagtatgaggatgaaatcaacaagcgtaccactgctgagaatgagtttgtgatgctgaagaaggatgtagatgctgcctacatgaacaaggtggagctggaggccaaggttgatgcactgatggatgagattaacttcatgaagatgttctttgatgcggagctgtcccagatgcagacgcatgtctctgacacctcagtggtcctctccatggacaacaaccgcaacctggacctggatagcatcatcgctgaggtcaaggcccagtatgaggagattgccaaccgcagccggacagaagccgagtcctggtatcagaccaagtatgaggagctgcagcagacagctggccggcatggcgatgacctccgcaacaccaagcatgagatctctgagatgaaccggatgatccagaggctgagagccgagattgacaatgtcaagaaacagtgcgccaatctgcagaacgccattgcggatgccgagcagcgtggggagctggccctcaaggatgccaggaacaagctggccgagctggaggaggccctgcagaaggccaagcaggacatggcccggctgctgcgtgagtaccaggagctcatgaacaccaagctggccctggacgtggagatcgccacttaccgcaagctgctggagggcgaggaatgcagactcagtggagaaggagttggaccagtcaacatctctgttgtcacaagcagtgtttcctctggatatggcagtggcagtggctatggcggtggcctcggtggaggtcttggcggcggcctcggtggaggtcttgccggaggtagcagtggaagctactactccagcagcagtgggggtgtcggcctaggtggtgggctcagtgtggggggctctggcttcagtgcaagcagtggccgagggctgggggtgggctttggcagtggcgggggtagcagctccagcgtcaaatttgtctccaccacctcctcctcccggaagagcttcaagagctaagaacctgctgcaagtcactgccttccaagtgcagcaacccagcccatggagattgcctcttctaggcagttgctcaagccatgttttatccttttctggagagtagtctagaccaagccaattgcagaaccacattctttggttcccaggagagccccattcccagcccctggtctcccgtgccgcagttctatattctgcttcaaatcagccttcaggtttcccacagcatggcccctgctgacacgagaacccaaagttttcccaaatctaaatcatcaaaacagaatccccaccccaatcccaaattttgttttggttctaactacctccagaatgtgttcaataaaatgcttttataatataatcgacagctctctcgcccagcccagttctggaagggataaaaagggggcatcaccgttcctgggtaacagagccaccttctgcgtcctgctgagctctgttctctccagcacctcccaacccactagtgcctggttctcttgctccaccaggaacaagccaccatgtctcgccagtcaagtgtgtccttccggagcgggggcagtcgtagcttcagcaccgcctctgccatcaccccgtctgtctcccgcaccagcttcacctccgtgtcccggtccgggggtggcggtggtggtggcttcggcagggtcagccttgcgggtgcttgtggagtgggtggctatggcagccggagcctctacaacctggggggctccaagaggatatccatcagcactagtggtggcagcttcaggaaccggtttggtgctggtgctggaggcggctatggctttggaggtggtgccggtagtggatttggtttcggcggtggagctggtggtggctttgggctcggtggcggagctggctttggaggtggcttcggtggccctggctttcctgtctgccctcctggaggtatccaagaggtcactgtcaaccagagtctcctgactcccctcaacctgcaaatcgaccccagcatccagagggtgaggaccgaggagcgcgagcagatcaagaccctcaacaataagtttgcctccttcatcgacaaggtgcggttcctggagcagcagaacaaggttctggacaccaagtggaccctgctgcaggagcagggcaccaagactgtgaggcagaacctggagccgttgttcgagcagtacatcaacaacctcaggaggcagctggacagcatcgtgggggaacggggccgcctggactcagagctgagaaacatgcaggacctggtggaagacttcaagaacaagtatgaggatgaaatcaacaagcgtaccactgctgagaatgagtttgtgatgctgaagaaggatgtagatgctgcctacatgaacaaggtggagctggaggccaaggttgatgcactgatggatgagattaacttcatgaagatgttctttgatgcggagctgtcccagatgcagacgcatgtctctgacacctcagtggtcctctccatggacaacaaccgcaacctggacctggatagcatcatcgctgaggtcaaggcccagtatgaggagattgccaaccgcagccggacagaagccgagtcctggtatcagaccaagtatgaggagctgcagcagacagctggccggcatggcgatgacctccgcaacaccaagcatgagatctctgagatgaaccggatgatccagaggctgagagccgagattgacaatgtcaagaaacagtgcgccaatctgcagaacgccattgcggatgccgagcagcgtggggagctggccctcaaggatgccaggaacaagctggccgagctggaggaggccctgcagaaggccaagcaggacatggcccggctgctgcgtgagtaccaggagctcatgaacaccaagctggccctggacgtggagatcgccacttaccgcaagctgctggagggcgaggaatgcagactcagtggagaaggagttggaccagtcaacatctctgttgtcacaagcagtgtttcctctggatatggcagtggcagtggctatggcggtggcctcggtggaggtcttggcggcggcctcggtggaggtcttgccggaggtagcagtggaagctactactccagcagcagtgggggtgtcggcctaggtggtgggctcagtgtggggggctctggcttcagtgcaagcagtggccgagggctgggggtgggctttggcagtggcgggggtagcagctccagcgtcaaatttgtctccaccacctcctcctcccggaagagcttcaagagctaagaacctgctgcaagtcactgccttccaagtgcagcaacccagcccatggagattgcctcttctaggcagttgctcaagccatgttttatccttttctggagagtagtctagaccaagccaattgcagaaccacattctttggttcccaggagagccccattcccagcccctggtctcccgtgccgcagttctatattctgcttcaaatcagccttcaggtttcccacagcatggcccctgctgacacgagaacccaaagttttcccaaatctaaatcatcaaaacagaatccccaccccaatcccaaattttgttttggttctaactacctccagaatgtgttcaataaaatgcttttataatataatcgacagctctctcgcccagcccagttctggaagggataaaaagggggcatcaccgttcctgggtaacagagccaccttctgcgtcctgctgagctctgttctctccagcacctcccaacccactagtgcctggttctcttgctccaccaggaacaagccaccatgtctcgccagtcaagtgtgtccttccggagcgggggcagtcgtagcttcagcaccgcctctgccatcaccccgtctgtctcccgcaccagcttcacctccgtgtcccggtccgggggtggcggtggtggtggcttcggcagggtcagccttgcgggtgcttgtggagtgggtggctatggcagccggagcctctacaacctggggggctccaagaggatatccatcagcactagtggtggcagcttcaggaaccggtttggtgctggtgctggaggcggctatggctttggaggtggtgccggtagtggatttggtttcggcggtggagctggtggtggctttgggctcggtggcggagctggctttggaggtggcttcggtggccctggctttcctgtctgccctcctggaggtatccaagaggtcactgtcaaccagagtctcctgactcccctcaacctgcaaatcgaccccagcatccagagggtgaggaccgaggagcgcgagcagatcaagaccctcaacaataagtttgcctccttcatcgacaaggtgcggttcctggagcagcagaacaaggttctggacaccaagtggaccctgctgcaggagcagggcaccaagactgtgaggcagaacctggagccgttgttcgagcagtacatcaacaacctcaggaggcagctggacagcatcgtgggggaacggggccgcctggactcagagctgagaaacatgcaggacctggtggaagacttcaagaacaagtatgaggatgaaatcaacaagcgtaccactgctgagaatgagtttgtgatgctgaagaaggatgtagatgctgcctacatgaacaaggtggagctggaggccaaggttgatgcactgatggatgagattaacttcatgaagatgttctttgatgcggagctgtcccagatgcagacgcatgtctctgacacctcagtggtcctctccatggacaacaaccgcaacctggacctggatagcatcatcgctgaggtcaaggcccagtatgaggagattgccaaccgcagccggacagaagccgagtcctggtatcagaccaagtatgaggagctgcagcagacagctggccggcatggcgatgacctccgcaacaccaagcatgagatctctgagatgaaccggatgatccagaggctgagagccgagattgacaatgtcaagaaacagtgcgccaatctgcagaacgccattgcggatgccgagcagcgtggggagctggccctcaaggatgccaggaacaagctggccgagctggaggaggccctgcagaaggccaagcaggacatggcccggctgctgcgtgagtaccaggagctcatgaacaccaagctggccctggacgtggagatcgccacttaccgcaagctgctggagggcgaggaatgcagactcagtggagaaggagttggaccagtcaacatctctgttgtcacaagcagtgtttcctctggatatggcagtggcagtggctatggcggtggcctcggtggaggtcttggcggcggcctcggtggaggtcttgccggaggtagcagtggaagctactactccagcagcagtgggggtgtcggcctaggtggtgggctcagtgtggggggctctggcttcagtgcaagcagtggccgagggctgggggtgggctttggcagtggcgggggtagcagctccagcgtcaaatttgtctccaccacctcctcctcccggaagagcttcaagagctaagaacctgctgcaagtcactgccttccaagtgcagcaacccagcccatggagattgcctcttctaggcagttgctcaagccatgttttatccttttctggagagtagtctagaccaagccaattgcagaaccacattctttggttcccaggagagccccattcccagcccctggtctcccgtgccgcagttctatattctgcttcaaatcagccttcaggtttcccacagcatggcccctgctgacacgagaacccaaagttttcccaaatctaaatcatcaaaacagaatccccaccccaatcccaaattttgttttggttctaactacctccagaatgtgttcaataaaatgcttttataatataatcgacagctctctcgcccagcccagttctggaagggataaaaagggggcatcaccgttcctgggtaacagagccaccttctgcgtcctgctgagctctgttctctccagcacctcccaacccactagtgcctggttctcttgctccaccaggaacaagccaccatgtctcgccagtcaagtgtgtccttccggagcgggggcagtcgtagcttcagcaccgcctctgccatcaccccgtctgtctcccgcaccagcttcacctccgtgtcccggtccgggggtggcggtggtggtggcttcggcagggtcagccttgcgggtgcttgtggagtgggtggctatggcagccggagcctctacaacctggggggctccaagaggatatccatcagcactagtggtggcagcttcaggaaccggtttggtgctggtgctggaggcggctatggctttggaggtggtgccggtagtggatttggtttcggcggtggagctggtggtggctttgggctcggtggcggagctggctttggaggtggcttcggtggccctggctttcctgtctgccctcctggaggtatccaagaggtcactgtcaaccagagtctcctgactcccctcaacctgcaaatcgaccccagcatccagagggtgaggaccgaggagcgcgagcagatcaagaccctcaacaataagtttgcctccttcatcgacaaggtgcggttcctggagcagcagaacaaggttctggacaccaagtggaccctgctgcaggagcagggcaccaagactgtgaggcagaacctggagccgttgttcgagcagtacatcaacaacctcaggaggcagctggacagcatcgtgggggaacggggccgcctggactcagagctgagaaacatgcaggacctggtggaagacttcaagaacaagtatgaggatgaaatcaacaagcgtaccactgctgagaatgagtttgtgatgctgaagaaggatgtagatgctgcctacatgaacaaggtggagctggaggccaaggttgatgcactgatggatgagattaacttcatgaagatgttctttgatgcggagctgtcccagatgcagacgcatgtctctgacacctcagtggtcctctccatggacaacaaccgcaacctggacctggatagcatcatcgctgaggtcaaggcccagtatgaggagattgccaaccgcagccggacagaagccgagtcctggtatcagaccaagtatgaggagctgcagcagacagctggccggcatggcgatgacctccgcaacaccaagcatgagatctctgagatgaaccggatgatccagaggctgagagccgagattgacaatgtcaagaaacagtgcgccaatctgcagaacgccattgcggatgccgagcagcgtggggagctggccctcaaggatgccaggaacaagctggccgagctggaggaggccctgcagaaggccaagcaggacatggcccggctgctgcgtgagtaccaggagctcatgaacaccaagctggccctggacgtggagatcgccacttaccgcaagctgctggagggcgaggaatgcagactcagtggagaaggagttggaccagtcaacatctctgttgtcacaagcagtgtttcctctggatatggcagtggcagtggctatggcggtggcctcggtggaggtcttggcggcggcctcggtggaggtcttgccggaggtagcagtggaagctactactccagcagcagtgggggtgtcggcctaggtggtgggctcagtgtggggggctctggcttcagtgcaagcagtggccgagggctgggggtgggctttggcagtggcgggggtagcagctccagcgtcaaatttgtctccaccacctcctcctcccggaagagcttcaagagctaagaacctgctgcaagtcactgccttccaagtgcagcaacccagcccatggagattgcctcttctaggcagttgctcaagccatgttttatccttttctggagagtagtctagaccaagccaattgcagaaccacattctttggttcccaggagagccccattcccagcccctggtctcccgtgccgcagttctatattctgcttcaaatcagccttcaggtttcccacagcatggcccctgctgacacgagaacccaaagttttcccaaatctaaatcatcaaaacagaatccccaccccaatcccaaattttgttttggttctaactacctccagaatgtgttcaataaaatgcttttataatataatcgacagctctctcgcccagcccagttctggaagggataaaaagggggcatcaccgttcctgggtaacagagccaccttctgcgtcctgctgagctctgttctctccagcacctcccaacccactagtgcctggttctcttgctccaccaggaacaagccaccatgtctcgccagtcaagtgtgtccttccggagcgggggcagtcgtagcttcagcaccgcctctgccatcaccccgtctgtctcccgcaccagcttcacctccgtgtcccggtccgggggtggcggtggtggtggcttcggcagggtcagccttgcgggtgcttgtggagtgggtggctatggcagccggagcctctacaacctggggggctccaagaggatatccatcagcactagtggtggcagcttcaggaaccggtttggtgctggtgctggaggcggctatggctttggaggtggtgccggtagtggatttggtttcggcggtggagctggtggtggctttgggctcggtggcggagctggctttggaggtggcttcggtggccctggctttcctgtctgccctcctggaggtatccaagaggtcactgtcaaccagagtctcctgactcccctcaacctgcaaatcgaccccagcatccagagggtgaggaccgaggagcgcgagcagatcaagaccctcaacaataagtttgcctccttcatcgacaaggtgcggttcctggagcagcagaacaaggttctggacaccaagtggaccctgctgcaggagcagggcaccaagactgtgaggcagaacctggagccgttgttcgagcagtacatcaacaacctcaggaggcagctggacagcatcgtgggggaacggggccgcctggactcagagctgagaaacatgcaggacctggtggaagacttcaagaacaagtatgaggatgaaatcaacaagcgtaccactgctgagaatgagtttgtgatgctgaagaaggatgtagatgctgcctacatgaacaaggtggagctggaggccaaggttgatgcactgatggatgagattaacttcatgaagatgttctttgatgcggagctgtcccagatgcagacgcatgtctctgacacctcagtggtcctctccatggacaacaaccgcaacctggacctggatagcatcatcgctgaggtcaaggcccagtatgaggagattgccaaccgcagccggacagaagccgagtcctggtatcagaccaagtatgaggagctgcagcagacagctggccggcatggcgatgacctccgcaacaccaagcatgagatctctgagatgaaccggatgatccagaggctgagagccgagattgacaatgtcaagaaacagtgcgccaatctgcagaacgccattgcggatgccgagcagcgtggggagctggccctcaaggatgccaggaacaagctggccgagctggaggaggccctgcagaaggccaagcaggacatggcccggctgctgcgtgagtaccaggagctcatgaacaccaagctggccctggacgtggagatcgccacttaccgcaagctgctggagggcgaggaatgcagactcagtggagaaggagttggaccagtcaacatctctgttgtcacaagcagtgtttcctctggatatggcagtggcagtggctatggcggtggcctcggtggaggtcttggcggcggcctcggtggaggtcttgccggaggtagcagtggaagctactactccagcagcagtgggggtgtcggcctaggtggtgggctcagtgtggggggctctggcttcagtgcaagcagtggccgagggctgggggtgggctttggcagtggcgggggtagcagctccagcgtcaaatttgtctccaccacctcctcctcccggaagagcttcaagagctaagaacctgctgcaagtcactgccttccaagtgcagcaacccagcccatggagattgcctcttctaggcagttgctcaagccatgttttatccttttctggagagtagtctagaccaagccaattgcagaaccacattctttggttcccaggagagccccattcccagcccctggtctcccgtgccgcagttctatattctgcttcaaatcagccttcaggtttcccacagcatggcccctgctgacacgagaacccaaagttttcccaaatctaaatcatcaaaacagaatccccaccccaatcccaaattttgttttggttctaactacctccagaatgtgttcaataaaatgcttttataatataatcgacagctctctcgcccagcccagttctggaagggataaaaagggggcatcaccgttcctgggtaacagagccaccttctgcgtcctgctgagctctgttctctccagcacctcccaacccactagtgcctggttctcttgctccaccaggaacaagccaccatgtctcgccagtcaagtgtgtccttccggagcgggggcagtcgtagcttcagcaccgcctctgccatcaccccgtctgtctcccgcaccagcttcacctccgtgtcccggtccgggggtggcggtggtggtggcttcggcagggtcagccttgcgggtgcttgtggagtgggtggctatggcagccggagcctctacaacctggggggctccaagaggatatccatcagcactagtggtggcagcttcaggaaccggtttggtgctggtgctggaggcggctatggctttggaggtggtgccggtagtggatttggtttcggcggtggagctggtggtggctttgggctcggtggcggagctggctttggaggtggcttcggtggccctggctttcctgtctgccctcctggaggtatccaagaggtcactgtcaaccagagtctcctgactcccctcaacctgcaaatcgaccccagcatccagagggtgaggaccgaggagcgcgagcagatcaagaccctcaacaataagtttgcctccttcatcgacaaggtgcggttcctggagcagcagaacaaggttctggacaccaagtggaccctgctgcaggagcagggcaccaagactgtgaggcagaacctggagccgttgttcgagcagtacatcaacaacctcaggaggcagctggacagcatcgtgggggaacggggccgcctggactcagagctgagaaacatgcaggacctggtggaagacttcaagaacaagtatgaggatgaaatcaacaagcgtaccactgctgagaatgagtttgtgatgctgaagaaggatgtagatgctgcctacatgaacaaggtggagctggaggccaaggttgatgcactgatggatgagattaacttcatgaagatgttctttgatgcggagctgtcccagatgcagacgcatgtctctgacacctcagtggtcctctccatggacaacaaccgcaacctggacctggatagcatcatcgctgaggtcaaggcccagtatgaggagattgccaaccgcagccggacagaagccgagtcctggtatcagaccaagtatgaggagctgcagcagacagctggccggcatggcgatgacctccgcaacaccaagcatgagatctctgagatgaaccggatgatccagaggctgagagccgagattgacaatgtcaagaaacagtgcgccaatctgcagaacgccattgcggatgccgagcagcgtggggagctggccctcaaggatgccaggaacaagctggccgagctggaggaggccctgcagaaggccaagcaggacatggcccggctgctgcgtgagtaccaggagctcatgaacaccaagctggccctggacgtggagatcgccacttaccgcaagctgctggagggcgaggaatgcagactcagtggagaaggagttggaccagtcaacatctctgttgtcacaagcagtgtttcctctggatatggcagtggcagtggctatggcggtggcctcggtggaggtcttggcggcggcctcggtggaggtcttgccggaggtagcagtggaagctactactccagcagcagtgggggtgtcggcctaggtggtgggctcagtgtggggggctctggcttcagtgcaagcagtggccgagggctgggggtgggctttggcagtggcgggggtagcagctccagcgtcaaatttgtctccaccacctcctcctcccggaagagcttcaagagctaagaacctgctgcaagtcactgccttccaagtgcagcaacccagcccatggagattgcctcttctaggcagttgctcaagccatgttttatccttttctggagagtagtctagaccaagccaattgcagaaccacattctttggttcccaggagagccccattcccagcccctggtctcccgtgccgcagttctatattctgcttcaaatcagccttcaggtttcccacagcatggcccctgctgacacgagaacccaaagttttcccaaatctaaatcatcaaaacagaatccccaccccaatcccaaattttgttttggttctaactacctccagaatgtgttcaataaaatgcttttataatataatcgacagctctctcgcccagcccagttctggaagggataaaaagggggcatcaccgttcctgggtaacagagccaccttctgcgtcctgctgagctctgttctctccagcacctcccaacccactagtgcctggttctcttgctccaccaggaacaagccaccatgtctcgccagtcaagtgtgtccttccggagcgggggcagtcgtagcttcagcaccgcctctgccatcaccccgtctgtctcccgcaccagcttcacctccgtgtcccggtccgggggtggcggtggtggtggcttcggcagggtcagccttgcgggtgcttgtggagtgggtggctatggcagccggagcctctacaacctggggggctccaagaggatatccatcagcactagtggtggcagcttcaggaaccggtttggtgctggtgctggaggcggctatggctttggaggtggtgccggtagtggatttggtttcggcggtggagctggtggtggctttgggctcggtggcggagctggctttggaggtggcttcggtggccctggctttcctgtctgccctcctggaggtatccaagaggtcactgtcaaccagagtctcctgactcccctcaacctgcaaatcgaccccagcatccagagggtgaggaccgaggagcgcgagcagatcaagaccctcaacaataagtttgcctccttcatcgacaaggtgcggttcctggagcagcagaacaaggttctggacaccaagtggaccctgctgcaggagcagggcaccaagactgtgaggcagaacctggagccgttgttcgagcagtacatcaacaacctcaggaggcagctggacagcatcgtgggggaacggggccgcctggactcagagctgagaaacatgcaggacctggtggaagacttcaagaacaagtatgaggatgaaatcaacaagcgtaccactgctgagaatgagtttgtgatgctgaagaaggatgtagatgctgcctacatgaacaaggtggagctggaggccaaggttgatgcactgatggatgagattaacttcatgaagatgttctttgatgcggagctgtcccagatgcagacgcatgtctctgacacctcagtggtcctctccatggacaacaaccgcaacctggacctggatagcatcatcgctgaggtcaaggcccagtatgaggagattgccaaccgcagccggacagaagccgagtcctggtatcagaccaagtatgaggagctgcagcagacagctggccggcatggcgatgacctccgcaacaccaagcatgagatctctgagatgaaccggatgatccagaggctgagagccgagattgacaatgtcaagaaacagtgcgccaatctgcagaacgccattgcggatgccgagcagcgtggggagctggccctcaaggatgccaggaacaagctggccgagctggaggaggccctgcagaaggccaagcaggacatggcccggctgctgcgtgagtaccaggagctcatgaacaccaagctggccctggacgtggagatcgccacttaccgcaagctgctggagggcgaggaatgcagactcagtggagaaggagttggaccagtcaacatctctgttgtcacaagcagtgtttcctctggatatggcagtggcagtggctatggcggtggcctcggtggaggtcttggcggcggcctcggtggaggtcttgccggaggtagcagtggaagctactactccagcagcagtgggggtgtcggcctaggtggtgggctcagtgtggggggctctggcttcagtgcaagcagtggccgagggctgggggtgggctttggcagtggcgggggtagcagctccagcgtcaaatttgtctccaccacctcctcctcccggaagagcttcaagagctaagaacctgctgcaagtcactgccttccaagtgcagcaacccagcccatggagattgcctcttctaggcagttgctcaagccatgttttatccttttctggagagtagtctagaccaagccaattgcagaaccacattctttggttcccaggagagccccattcccagcccctggtctcccgtgccgcagttctatattctgcttcaaatcagccttcaggtttcccacagcatggcccctgctgacacgagaacccaaagttttcccaaatctaaatcatcaaaacagaatccccaccccaatcccaaattttgttttggttctaactacctccagaatgtgttcaataaaatgcttttataatataatcgacagctctctcgcccagcccagttctggaagggataaaaagggggcatcaccgttcctgggtaacagagccaccttctgcgtcctgctgagctctgttctctccagcacctcccaacccactagtgcctggttctcttgctccaccaggaacaagccaccatgtctcgccagtcaagtgtgtccttccggagcgggggcagtcgtagcttcagcaccgcctctgccatcaccccgtctgtctcccgcaccagcttcacctccgtgtcccggtccgggggtggcggtggtggtggcttcggcagggtcagccttgcgggtgcttgtggagtgggtggctatggcagccggagcctctacaacctggggggctccaagaggatatccatcagcactagtggtggcagcttcaggaaccggtttggtgctggtgctggaggcggctatggctttggaggtggtgccggtagtggatttggtttcggcggtggagctggtggtggctttgggctcgg

SEQ ID NO: 999 - DNA, 5909 bp, Homo sapiens
  misc_feature (153)..(153): second gene starts at position 153
atggtttcccatttcatggggtctctcagtgtcctgtgtttccttctgctgcttggattccagttcgtctgcccacagccctccactcaacacaggaaggtcccgcagcggatggcggcggagggcgcccccgaggacgacggcggcggcggcgccccgggagtgtggggcgcctggggcccctggtcggcctgctcgcgtagctgcagcggcggcgtgatggagcagacgcggccctgcctgccccgctcctaccgcctgcgcggcggccagcggcctggcgcccctgcgcgcgccttcgcggaccacgtggtgtcggcggtgcgcacgtcggtgccactgcaccggagccgcgacgagacgccagcgctggccggtacggacgccagccgccagggccccacggtgctgcgaggcagccggcacccacagccccagggcctcgaagtcactggggacagaaggagcaggacccgtggtaccattggccctggcaagtatggctatggtaaggccccatatatcttaccactgcagacagacactgcacacacgccacagaggctccggagacagaagctctcatcccgccattccaggtcccagggagcatcttctgctaggcatggctacagttcaccagcccaccaggtcccccaacatgggcctttgtaccaaagtgacagtggccctcgctctggactgcaggctgcggaggcccccatctaccagctacctttgacccatgatcaaggctaccctgcagcttcaagtctctttcacagcccagaaacaagcaacaaccacggtgtggggacccatggggcaactcagagcttctctcagcctgcccgatctacagcaatctcatgcatcggggcctatcggcagtacaagctgtgcaacaccaacgtatgtccagaaagcagtagaagtatccgggaggtacagtgtgcatcctacaacaacaagccattcatgggccggttttatgagtgggaaccatttgcagaagtaaaaggcaatcgcaaatgtgagttgaactgccaggcaatgggctaccgcttctatgtacggcaagctgagaaagtcatcgatggcaccccctgtgaccagaacggcacggccatctgtgtgtctgggcagtgcaaggtgttccatgagcaaggcatcctgttcggctaccgccatccacagagttctgccactgcctgcatcctcagccttttccaaatgaccaatgagactctcaacatttggactcacttgctgcccttctggttctttgcatggaggtttgtgactgcactgtatatgacagacatcaagaatgacagctactcctggcccatgcttgtgtacatgtgcaccagctgcgtgtacccacttgtgtccagctgtgcgcacaccttcagctctatgtccaagaatgcccggcacatttgctacttcctggactatggtgccgtcaacctcttcagcctgggctcagccattgcctactctgcatacacgttcccggatgcgctcatgtgcaccactttccatgactactacgtggccctggctgtactgaacaccatcctcagcacaggcctctcctgctactccaggtttcttgaaatccagaagcccagactctgtaaggtgattcgtgtcctcgcctttgcttatccgtacacctgggactccctccccatcttctacaggctattcctgttcccaggggagagtgcacaaaatgaagccacctcgtaccaccagaagcacatgatcatgaccctcctggcctctttcttgtactctgcacatctgccagaacgcctagcccctggacgctttgactacatcggtcacagtcaccagctgtttcacgtgtgtgtgatcctggccacgcacatgcagatggaagccatacttctggacaagactctgaggaaggaatggctcctggccacctccaagcccttctctttctctcagatagctggagccatacttctgtgcatcatcttcagcctcagcaacataatttatttctcagctgctctgtatcggattcccaagccagaattacataaaaaagaaacatgactcagaccataagcttttcatgccagatgtcaacattaagctgcaacatcctaaccaccataagccggaggtggttacagcttatcatggcctaaaatattcataatggttggtgtcttttgaatgaattcatgtcaaaaatgttattcagctggggaaatttctctaaatgtacactgattctgtgtgtgtgattttaaaaggagaatatggttcaagcaagtccttgttaaggcaaactattgatatttcattaattttaaatttacttaaaatgtggttttaaattctatttaaacatttggattaagcatattactctggagctttgtattattctttaaaaatgaatcttgcttcatttgatgaatttcatgtcacaaagcttctctcaagagctctcgtagtggcctgtcaaccactttcggagaatgagccaggtcagtcactgggaggacctgtgaaagaaagttggtcactgagtgccttggggactggcaaaacattccagaatgaagagagctgtctggggagagcccttcttcccttctccacctagtgaagggagaacagaaggggagtcctctcttcccacaagtccattctgccttcaaagtgtaagttctcatgtcattatggatttggagtttgtcagtttttttcttaaaagtccacagcggggtgtcatgtgttctgttatgttctgttttctggttgccagtttgatctgcaaagtatttttcagtgcaggtaaaatgtgttaaaccataagagttgactgagttaatcccaattggttgtgctcatatgccaccttttaaaccaatggaaattgctatatttggggatgtcatacatttgatattgcttcagcatttcaaatatgttgcaaaatttagtatccatatgcataagaagttaatcaccttgccagtggggtggtcacatatagtgttctcaagctttactgtgaatcagaaacatccagtaagcttgtgacaaatgcagactcctagggaaaaccagggggttctgcttcactaggttaaatgtaggttttgtagaggagatctgcactggagcaagtctcccagatgattctaatacaggagggccagaggccaaacttgaagaactgctggtgttacatgttccaaaaggcattagacctatcagctttgtttcgcctgatctcaagttttagcaactcaccaactaaggcgtaacctcattttatgttccagcgttttctactctgaatagttctaaaacactgagcattttctcatttgttgcattactgattaaagttcagtatttcatggtgttttcagggaacacagaaatgcggatgcaaaacaacttttgacagaggcccatcaaacccagatctgcacttggtaatgacttaggggggcttcctcacaatgcaggatcctctttgctgactcaggaatactccatattttagactactgcctctaccattaactagcccagacatttgaatggccttgtaaacagctcactgtctaatactcgaaggacaagtaacaatttatattggatgagagtggtcaagaaatatgatttcgttagttttattatctgtttacttcctctggggaaggcagactgataaaattatatgggctggtaaatttttggtacattaattgcaagctgcatgacaaaatttgtttttctggcaacaatctgacattattagtggaattccacaccaacagggcttgtgagcttccatttcatcttactgtaacttcaattttatggcaaaaaaaggtacaaagtttaaatacccctttctagtaatgccaaagacatacagtgttttacattctctcctttataggtaacaaaataatgtttagctcagtaagtactgaaataatgagtgaccaatttgaaggatttttagattatttaatctttgcttatgttgctttttcacatgcttaatgatggaaatgaaatgttaaatcaacaaaataagatccagtgtttcataacatttttataagtttggtaaactttagtcccattatatacttttggggacagtgttataaatcagaattttacgacagtttgcagaacactgatttgaaagcttcctatgcaaaatgagaaggggttcaaatatattaattatcattaagtattaaataataggcattagatgtctaatgtgagtataatttcatccaagccatctcagaaagtctaaaaggttggcagggggtcagctgaagacctcactggagtgggtcttaatttttaaaaagtgtctcactacatttaagacatgtgacacattcccattggtaacaattgctcaccatggcattgtctcaaaaaagactatggtggggagggtggcacattcctaatgggatgtacctctccccactccccttgcttgagaagcactactcaaaaatttaccagaccttacaactgtgataaaacttgaatgtgtatgatgaataaggccattcagttaactttacctccctttacccattgaaggggttccttttccattgctcagtttttagaaaataattctcatcttttttctaaagaaatgaatttgtggctggtctgaaggtagtgagttagctcaattgattgttcgcagtcagttatagatcaagctccttgttctactcttcccctcttctcactactgcacttgactagtcttaaaacaaagaaagaacgaatgaatgaatgaatctgtggctggatgcagtggctcatgcctgtaatcccagcactttgggaggctgaagtgggaggactgcttgggcccaagaattcaggaccagtctgggcaacagagccagacactgtctctataaaaaaaagttaaaactagctggttgtggtggtgcacacctgtggtcccagctactgtggagggtgatgtgggaggattgcttgaacccaggagttggatgctgcagtgagctatgattgcgccattgcgctccagactgggcaacagggcaagaccctgcctcaaaaaaaaaaaaaaaagaatttgtaattgttggtaggatgttatgggaaatttagaggtcttctgagtataaagtggtttaaatatttggtctgctgaagtctttctggaagtgttgttccccctgctgccccgcccagtagaaacttgctcatatgagaggttctgaggtaggtgcggtgtagtagaatggcattgtcagatatgttcaagaaacccttcatttgacactattttgtaccttatggtaccctttaacattttttaattaaaaaaaatattttttgagacagggtcttgttctgttgcccaggctggagtgtagtgttgcaatcttggctcactgcaacctctgcctgacaggcttcagtgatctttccacctcagcctcctgagtagctgggactacaggtgcatgccaccaagcctggctaactttttgtagagatagggttttgccatgctgcccaggctggcttagaattcctgaattcaagtgatttgtctgcctcaggctcccaaagtgctgggattacaggcatgagccacactgcacccagtccatgctaccctttttatatgaaacacctattaacacggtacaacaacacttcaaaacatattatttgaatttcggcctctgattttctagtcaacaatccattaaggcaaagacctgtttccaaactcagatgttctccaacttacactaatgtctggttttcttgaactatgtgagagaaaaaaataaacagaatttatttattat

SEQ ID NO: 1000 - DNA, 5909 bp, Homo sapiens; identical to SEQ ID NO: 999
  misc_feature (153)..(153): second gene starts at position 153

SEQ ID NO: 1001 - DNA, 32765 bp, Homo sapiens
  misc_feature (510)..(510): second gene starts at position 510
acttaagcttcgacgcaggaggcggggctgctcagtcctccaggcgtcggtactcagcggtgttggaacttcgttgcttgcttgcctgtgcgcgcgtgcgcggacatggcctcaaacgattatacccaacaagcaacccaaagctatggggcctaccccacccagcccgggcagggctattcccagcagagcagtcagccctacggacagcagagttacagtggttatagccagtccacggacacttcaggctatggccagagcagctattcttcttatggccagagccagaacacaggctatggaactcagtcaactccccagggatatggctcgactggcggctatggcagtagccagagctcccaatcgtcttacgggcagcagtcctcctaccctggctatggccagcagccagctcccagcagcacctcgggaagttacggtagcagttctcagagcagcagctatgggcagccccagagtgggagctacagccagcagcctagctatggtggacagcagcaaagctatggacagcagcaaagctataatccccctcagggctatggacagcagaaccagtacaacagcagcagtggtggtggaggtggaggtggaggtggaggtaactatggccaagatcaatcctccatgagtagtggtggtggcagtggtggcggttatggcaatcaagaccagagtggtggaggtggcagcggtggctatggacagcaggaccgtggaggccgcggcaggggtggcagtggtggcggcggcggcggcggcggtggtggttacaaccgcagcagtggtggctatgaacccagaggtcgtggaggtggccgtggaggcagaggtggcatggggccctcgggaccaaggatcacgtcatgactccgaacaggataattcagacaacaacaccatctttgtgcaaggcctgggtgagaatgttacaattgagtctgtggctgattacttcaagcagattggtattattaagacaaacaagaaaacgggacagcccatgattaatttgtacacagacagggaaactggcaagctgaagggagaggcaacggtctcttttgatgacccaccttcagctaaagcagctattgactggtttgatggtaaagaattctccggaaatcctatcaaggtctcatttgctactcgccgggcagactttaatcggggtggtggcaatggtcgtggaggccgagggcgaggaggacccatgggccgtggaggctatggaggtggtggcagtggtggtggtggccgaggaggatttcccagtggaggtggtggcggtggaggacagcagcgagctggtgactggaagtgtcctaatcccacctgtgagaatatgaacttctcttggaggaatgaatgcaaccagtgtaaggcccctaaaccagatggcccaggagggggaccaggtggctctcacatggggggtaactacggggatgatcgtcgtggtggcagaggaggctatgatcgaggcggctaccggggccgcggcggggaccgtggaggcttccgagggggccggggtggtggggacagaggtggctttggccctggcaagatggattccaggggtgagcacagacaggatcgcagggagaggccgtattaattagcctggctccccaggttctggaacagctttttgtcctgtacccagtgttaccctcgttattttgtaaccttccaattcctgatcacccaagggtttttttgtgtcggactatgtaattgtaactatacctctggttcccattaaaagtgaccattttagttaaattttgttcctcttcccccttttcactttcctggaagatcgatgtcccgatcaggaaggtagagagttttcctgttcagattaccctgcccagcaggaactggaatacagtgttcggggagaaggccaaatgatatccttgagagcagagattaaacttttctgtcatggggaaagttggtgtataaatgagaaatgaagaacatgggatgtcatgagtgttggcctaaatttgcccagctatggggaatttttcctttaccacatttatttgcatactggtcttagtttatttgcagcagtttatccctttttaagaactctttgatcttttggcccttttaatggtgaggctcaaacaaactacatttaaatggggcagtattcagatttgaccatggtggagagcgcttagccactctgggtctttcacaggaaggagagtaactgagtgctgcaggagtttgtggagtggagtcaggatctaggaggtgagtgactcccttcctagctgccctggtgaacagcgcttgggtagatacctgctataaggagactggtctggctgggttactttcacatcctgcctgtactcagagggcttgaggtcattgacattatgagattttaggcttgatccctttttgattggagggtggaaggccctcctaagggaatgataagtgataagagggggaaggggttgcagccaatgagttaaaaccttagagcagtgctcctcagcctcttaccatgtggttgtaaacttgcacgtacctgccaaccagttatttagcatgctttttattttagttacacagagcgtaacattaacccaagagcagaaaggttttatttacagggttttcgaacttggtttgtaagacagctgccatcacaagcatagcttacaaatgtgctggggacccctaattgggaagtgctttcctctcaaatttttattttttatttttagagacagagtcttgctctgtcatccaggctggagtgcagtggcgtgatctcggctcactgtagcctctgcctcctgagtttaagcgattctcctgcctcaggagaatcccagcttctgagtagctgagactacaggcgtgggccaccatgcccacctagtttttgcatttttagtggaggtgtggtttcactgtgttggccaggctggtctcttaactcctgacctcaggtgatccacctgccttggcctcccaaagtgctggaattacaggcatgagccgctgcatctggccatcctctcaaattttcaagtgttccacaagtatgttctctactgaagagttgctgcatccttgaatcttgggtgatttgaggcacagaaactatgactttattttttgagatggagttttgctcttgttgcccaggctggagtgcaatggcacgtttttcggcttaccgcaactgccgcctcctgggttcaagcgatagctgggattacaggcatgcgccaccatgcccagctaatttatttgtatttttagtagagacggggtttctccatgttggtcaggctggtctcgaactcccgacctcaggtgatgtgcacacctcagcctcccaataaaccatgacttttaagaggaatagcaggtttacttcccctgccagcattggggtgctctctaagcaacagtaggcggagagtggtctggcgtattaaaaacaaaggatcgtcaagtgggccttcccaggcattgctttgacttagtacatgtagaggatgtggcagttctctccgtccctgccactgctggtttctttgttaaatgtttagttgaaatggcctgatacgatatttgagtagttcactgttggtgctttgcctagcaggattctaatcttgctttggttgtggtcccctgatgccctcctgttaggagtggaggaggtcgaagctccttgtaagatatgattactgggaccattagtgtcaagttcctgtgtccttcaaatggcatatgtgattggccttgaccttaaaaggaaatagggtcccaggtgactgtttagtgggtaggtccagtttggggggatcttccaggagaatggatagagacacctagcagcagagagaacattggtgcctctcaagccaacctcccacctcagcctcccaagtagctgggactacaggtgcttcctcgctaccacacctgggtaattttttttttaattacttttttttttttaagaaacagggtttcactgggttgcccaggctggtcttgaactggcctcaagtgacctgcctgcctcagcctcccaaagtgctgggatcacaggtgtgacccactgcgtttggccagaatactctattcttactgaatgattgaaatctgtcttgaagcattaggtgtcccatttttgtgagttggaattgggacaggctaagtaggaagtgaggagggtggggagagctgtgctgtaggtctgtttgtcccttccttgatgtagccttcagttagccctttcagcttttttccccatcttgtgccgggccttcctgggtttcagtacttggatgtagggctgcagttatgtcagtggtgggtagattgaccaggaattaaggtctagggtccagcccatgtgagacttgactcactgatctacctttaggcatgtcttccttccagtctcatcctttttaaattttggcttgactcaggatttaaaaactggaacggtgaaggtgacagcagtcggttggagcgagcatcccccaaagttcacaatgtggccgaggactttgattgcacattgttgtttttttaatagtcattccaaatatgagatgcgttgttacaggaagtcccttgccatcctaaaagccaccccacttctctctaaggagaatggcccagtcctctcccaagtccacacaggggaggtgatagcattgctttcgtgtaaattatgtaatgcaaaatttttttaatcttcgccttaatacttttttattttgttttattttgaatgatgagccttcgtgcccccccttcccccttttttgtcccccaacttgagatgtatgaaggcttttggtctccctgggagtgggtggaggcagccagggcttacctgtacactgacttgagaccagttgaataaaagtgcacaccttaaaaatgaaccgccgagaccgcgtccgccccgcgagcacagagcctcgcctttgccgatccgccgcccgtccacacccgccgccagctcaccatggatgatgatatcgccgcgctcgtcgtcgacaacggctccggcatgtgcaaggccggcttcgcgggcgacgatgccccccgggccgtcttcccctccatcgtggggcgccccaggcaccagggcgtgatggtgggcatgggtcagaaggattcctatgtgggcgacgaggcccagagcaagagaggcatcctcaccctgaagtaccccatcgagcacggcatcgtcaccaactgggacgacatggagaaaatctggcaccacaccttctacaatgagctgcgtgtggctcccgaggagcaccccgtgctgctgaccgaggcccccctgaaccccaaggccaaccgcgagaagatgacccagatcatgtttgagaccttcaacaccccagccatgtacgttgctatccaggctgtgctatccctgtacgcctctggccgtaccactggcatcgtgatggactccggtgacggggtcacccacactgtgcccatctacgaggggtatgccctcccccatgccatcctgcgtctggacctggctggccgggacctgactgactacctcatgaagatcctcaccgagcgcggctacagcttcaccaccacggccgagcgggaaatcgtgcgtgacattaaggagaagctgtgctacgtcgccctggacttcgagcaagagatggccacggctgcttccagctcctccctggagaagagctacgagctgcctgacggccaggtcatcaccattggcaatgagcggttccgctgccctgaggcactcttccagccttccttcctgggcatggagtcctgtggcatccacgaaactaccttcaactccatcatgaagtgtgacgtggacatccgcaaagacctgtacgccaacacagtgctgtctggcggcaccaccatgtaccctggcattgccgacaggatgcagaaggagatcactgccctggcacccagcacaatgaagatcaagatcattgctcctcctgagcgcaagtactccgtgtggatcggcggctccatcctggcctcgctgtccaccttccagcagatgtggatcagcaagcaggagtatgacgagtccggcccctccatcgtccaccgcaaatgcttctaggcggactatgacttagttgcgttacaccctttcttgacaaaacctaacttgcgcagaaaacaagatgagattggcatggctttatttgttttttttgttttgttttggttttttttttttttttggcttgactcaggatttaaaaactggaacggtgaaggtgacagcagtcggttggagcgagcatcccccaaagttcacaatgtggccgaggactttgattgcacattgttgtttttttaatagtcattccaaatatgagatgcgttgttacaggaagtcccttgccatcctaaaagccaccccacttctctctaaggagaatggcccagtcctctcccaagtccacacaggggaggtgatagcattgctttcgtgtaaattatgtaatgcaaaatttttttaatcttcgccttaatacttttttattttgttttattttgaatgatgagccttcgtgcccccccttcccccttttttgtcccccaacttgagatgtatgaaggcttttggtctccctgggagtgggtggaggcagccagggcttacctgtacactgacttgagaccagttgaataaaagtgcacaccttaaaaatgaaccgccgagaccgcgtccgccccgcgagcacagagcctcgcctttgccgatccgccgcccgtccacacccgccgccagctcaccatggatgatgatatcgccgcgctcgtcgtcgacaacggctccggcatgtgcaaggccggcttcgcgggcgacgatgccccccgggccgtcttcccctccatcgtggggcgccccaggcaccagggcgtgatggtgggcatgggtcagaaggattcctatgtgggcgacgaggcccagagcaagagaggcatcctcaccctgaagtaccccatcgagcacggcatcgtcaccaactgggacgacatggagaaaatctggcaccacaccttctacaatgagctgcgtgtggctcccgaggagcaccccgtgctgctgaccgaggcccccctgaaccccaaggccaaccgcgagaagatgacccagatcatgtttgagaccttcaacaccccagccatgtacgttgctatccaggctgtgctatccctgtacgcctctggccgtaccactggcatcgtgatggactccggtgacggggtcacccacactgtgcccatctacgaggggtatgccctcccccatgccatcctgcgtctggacctggctggccgggacctgactgactacctcatgaagatcctcaccgagcgcggctacagcttcaccaccacggccgagcgggaaatcgtgcgtgacattaaggagaagctgtgctacgtcgccctggacttcgagcaagagatggccacggctgcttccagctcctccctggagaagagctacgagctgcctgacggccaggtcatcaccattggcaatgagcggttccgctgccctgaggcactcttccagccttccttcctgggcatggagtcctgtggcatccacgaaactaccttcaactccatcatgaagtgtgacgtggacatccgcaaagacctgtacgccaacacagtgctgtctggcggcaccaccatgtaccctggcattgccgacaggatgcagaaggagatcactgccctggcacccagcacaatgaagatcaagatcattgctcctcctgagcgcaagtactccgtgtggatcggcggctccatcctggcctcgctgtccaccttccagcagatgtggatcagcaagcaggagtatgacgagtccggcccctccatcgtccaccgcaaatgcttctaggcggactatgacttagttgcgttacaccctttcttgacaaaacctaacttgcgcagaaaacaagatgagattggcatggctttatttgttttttttgttttgttttggttttttttttttttttggcttgactcaggatttaaaaactggaacggtgaaggtgacagcagtcggttggagcgagcatcccccaaagttcacaatgtggccgaggactttgattgcacattgttgtttttttaatagtcattccaaatatgagatgcgttgttacaggaagtcccttgccatcctaaaagccaccccacttctctctaaggagaatggcccagtcctctcccaagtccacacaggggaggtgatagcattgctttcgtgtaaattatgtaatgcaaaatttttttaatcttcgccttaatacttttttattttgttttattttgaatgatgagccttcgtgcccccccttcccccttttttgtcccccaacttgagatgtatgaaggcttttggtctccctgggagtgggtggaggcagccagggcttacctgtacactgacttgagaccagttgaataaaagtgcacaccttaaaaatgaaccgccgagaccgcgtccgccccgcgagcacagagcctcgcctttgccgatccgccgcccgtccacacccgccgccagctcaccatggatgatgatatcgccgcgctcgtcgtcgacaacggctccggcatgtgcaaggccggcttcgcgggcgacgatgccccccgggccgtcttcccctccatcgtggggcgccccaggcaccagggcgtgatggtgggcatgggtcagaaggattcctatgtgggcgacgaggcccagagcaagagaggcatcctcaccctgaagtaccccatcgagcacggcatcgtcaccaactgggacgacatggagaaaatctggcaccacaccttctacaatgagctgcgtgtggctcccgaggagcaccccgtgctgctgaccgaggcccccctgaaccccaaggccaaccgcgagaagatgacccagatcatgtttgagaccttcaacaccccagccatgtacgttgctatccaggctgtgctatccctgtacgcctctggccgtaccactggcatcgtgatggactccggtgacggggtcacccacactgtgcccatctacgaggggtatgccctcccccatgccatcctgcgtctggacctggctggccgggacctgactgactacctcatgaagatcctcaccgagcgcggctacagcttcaccaccacggccgagcgggaaatcgtgcgtgacattaaggagaagctgtgctacgtcgccctggacttcgagcaagagatggccacggctgcttccagctcctccctggagaagagctacgagctgcctgacggccaggtcatcaccattggcaatgagcggttccgctgccctgaggcactcttccagccttccttcctgggcatggagtcctgtggcatccacgaaactaccttcaactccatcatgaagtgtgacgtggacatccgcaaagacctgtacgccaacacagtgctgtctggcggcaccaccatgtaccctggcattgccgacaggatgcagaaggagatcactgccctggcacccagcacaatgaagatcaagatcattgctcctcctgagcgcaagtactccgtgtggatcggcggctccatcctggcctcgctgtccaccttccagcagatgtggatcagcaagcaggagtatgacgagtccggcccctccatcgtccaccgcaaatgcttctaggcggactatgacttagttgcgttacaccctttcttgacaaaacctaacttgcgcagaaaacaagatgagattggcatggctttatttgttttttttgttttgttttggttttttttttttttttggcttgactcaggatttaaaaactggaacggtgaaggtgacagcagtcggttggagcgagcatcccccaaagttcacaatgtggccgaggactttgattgcacattgttgtttttttaatagtcattccaaatatgagatgcgttgttacaggaagtcccttgccatcctaaaagccaccccacttctctctaaggagaatggcccagtcctctcccaagtccacacaggggaggtgatagcattgctttcgtgtaaattatgtaatgcaaaatttttttaatcttcgccttaatacttttttattttgttttattttgaatgatgagccttcgtgcccccccttcccccttttttgtcccccaacttgagatgtatgaaggcttttggtctccctgggagtgggtggaggcagccagggcttacctgtacactgacttgagaccagttgaataaaagtgcacaccttaaaaatgaaccgccgagaccgcgtccgccccgcgagcacagagcctcgcctttgccgatccgccgcccgtccacacccgccgccagctcaccatggatgatgatatcgccgcgctcgtcgtcgacaacggctccggcatgtgcaaggccggcttcgcgggcgacgatgccccccgggccgtcttcccctccatcgtggggcgccccaggcaccagggcgtgatggtgggcatgggtcagaaggattcctatgtgggcgacgaggcccagagcaagagaggcatcctcaccctgaagtaccccatcgagcacggcatcgtcaccaactgggacgacatggagaaaatctggcaccacaccttctacaatgagctgcgtgtggctcccgaggagcaccccgtgctgctgaccgaggcccccctgaaccccaaggccaaccgcgagaagatgacccagatcatgtttgagaccttcaacaccccagccatgtacgttgctatccaggctgtgctatccctgtacgcctctggccgtaccactggcatcgtgatggactccggtgacggggtcacccacactgtgcccatctacgaggggtatgccctcccccatgccatcctgcgtctggacctggctggccgggacctgactgactacctcatgaagatcctcaccgagcgcggctacagcttcaccaccacggccgagcgggaaatcgtgcgtgacattaaggagaagctgtgctacgtcgccctggacttcgagcaagagatggccacggctgcttccagctcctccctggagaagagctacgagctgcctgacggccaggtcatcaccattggcaatgagcggttccgctgccctgaggcactcttccagccttccttcctgggcatggagtcctgtggcatccacgaaactaccttcaactccatcatgaagtgtgacgtggacatccgcaaagacctgtacgccaacacagtgctgtctggcggcaccaccatgtaccctggcattgccgacaggatgcagaaggagatcactgccctggcacccagcacaatgaagatcaagatcattgctcctcctgagcgcaagtactccgtgtggatcggcggctccatcctggcctcgctgtccaccttccagcagatgtggatcagcaagcaggagtatgacgagtccggcccctccatcgtccaccgcaaatgcttctaggcggactatgacttagttgcgttacaccctttcttgacaaaacctaacttgcgcagaaaacaagatgagattggcatggctttatttgttttttttgttttgttttggttttttttttttttttggcttgactcaggatttaaaaactggaacggtgaaggtgacagcagtcggttggagcgagcatcccccaaagttcacaatgtggccgaggactttgattgcacattgttgtttttttaatagtcattccaaatatgagatgcgttgttacaggaagtcccttgccatcctaaaagccaccccacttctctctaaggagaatggcccagtcctctcccaagtccacacaggggaggtgatagcattgctttcgtgtaaattatgtaatgcaaaatttttttaatcttcgccttaatacttttttattttgttttattttgaatgatgagccttcgtgcccccccttcccccttttttgtcccccaacttgagatgtatgaaggcttttggtctccctgggagtgggtggaggcagccagggcttacctgtacactgacttgagaccagttgaataaaagtgcacaccttaaaaatgaaccgccgagaccgcgtccgccccgcgagcacagagcctcgcctttgccgatccgccgcccgtccacacccgccgccagctcaccatggatgatgatatcgccgcgctcgtcgtcgacaacggctccggcatgtgcaaggccggcttcgcgggcgacgatgccccccgggccgtcttcccctccatcgtggggcgccccaggcaccagggcgtgatggtgggcatgggtcagaaggattcctatgtgggcgacgaggcccagagcaagagaggcatcctcaccctgaagtaccccatcgagcacggcatcgtcaccaactgggacgacatggagaaaatctggcaccacaccttctacaatgagctgcgtgtggctcccgaggagcaccccgtgctgctgaccgaggcccccctgaaccccaaggccaaccgcgagaagatgacccagatcatgtttgagaccttcaacaccccagccatgtacgttgctatccaggctgtgctatccctgtacgcctctggccgtaccactggcatcgtgatggactccggtgacggggtcacccacactgtgcccatctacgaggggtatgccctcccccatgccatcctgcgtctggacctggctggccgggacctgactgactacctcatgaagatcctcaccgagcgcggctacagcttcaccaccacggccgagcgggaaatcgtgcgtgacattaaggagaagctgtgctacgtcgccctggacttcgagcaagagatggccacggctgcttccagctcctccctggagaagagctacgagctgcctgacggccaggtcatcaccattggcaatgagcggttccgctgccctgaggcactcttccagccttccttcctgggcatggagtcctgtggcatccacgaaactaccttcaactccatcatgaagtgtgacgtggacatccgcaaagacctgtacgccaacacagtgctgtctggcggcaccaccatgtaccctggcattgccgacaggatgcagaaggagatcactgccctggcacccagcacaatgaagatcaagatcattgctcctcctgagcgcaagtactccgtgtggatcggcggctccatcctggcctcgctgtccaccttccagcagatgtggatcagcaagcaggagtatgacgagtccggcccctccatcgtccaccgcaaatgcttctaggcggactatgacttagttgcgttacaccctttcttgacaaaacctaacttgcgcagaaaacaagatgagattggcatggctttatttgttttttttgttttgttttggttttttttttttttttggcttgactcaggatttaaaaactggaacggtgaaggtgacagcagtcggttggagcgagcatcccccaaagttcacaatgtggccgaggactttgattgcacattgttgtttttttaatagtcattccaaatatgagatgcgttgttacaggaagtcccttgccatcctaaaagccaccccacttctctctaaggagaatggcccagtcctctcccaagtccacacaggggaggtgatagcattgctttcgtgtaaattatgtaatgcaaaatttttttaatcttcgccttaatacttttttattttgttttattttgaatgatgagccttcgtgcccccccttcccccttttttgtcccccaacttgagatgtatgaaggcttttggtctccctgggagtgggtggaggcagccagggcttacctgtacactgacttgagaccagttgaataaaagtgcacaccttaaaaatgaaccgccgagaccgcgtccgccccgcgagcacagagcctcgcctttgccgatccgccgcccgtccacacccgccgccagctcaccatggatgatgatatcgccgcgctcgtcgtcgacaacggctccggcatgtgcaaggccggcttcgcgggcgacgatgccccccgggccgtcttcccctccatcgtggggcgccccaggcaccagggcgtgatggtgggcatgggtcagaaggattcctatgtgggcgacgaggcccagagcaagagaggcatcctcaccctgaagtaccccatcgagcacggcatcgtcaccaactgggacgacatggagaaaatctggcaccacaccttctacaatgagctgcgtgtggctcccgaggagcaccccgtgctgctgaccgaggcccccctgaaccccaaggccaaccgcgagaagatgacccagatcatgtttgagaccttcaacaccccagccatgtacgttgctatccaggctgtgctatccctgtacgcctctggccgtaccactggcatcgtgatggactccggtgacggggtcacccacactgtgcccatctacgaggggtatgccctcccccatgccatcctgcgtctggacctggctggccgggacctgactgactacctcatgaagatcctcaccgagcgcggctacagcttcaccaccacggccgagcgggaaatcgtgcgtgacattaaggagaagctgtgctacgtcgccctggacttcgagcaagagatggccacggctgcttccagctcctccctggagaagagctacgagctgcctgacggccaggtcatcaccattggcaatgagcggttccgctgccctgaggcactcttccagccttccttcctgggcatggagtcctgtggcatccacgaaactaccttcaactccatcatgaagtgtgacgtggacatccgcaaagacctgtacgccaacacagtgctgtctggcggcaccaccatgtaccctggcattgccgacaggatgcagaaggagatcactgccctggcacccagcacaatgaagatcaagatcattgctcctcctgagcgcaagtactccgtgtggatcggcggctccatcctggcctcgctgtccaccttccagcagatgtggatcagcaagcaggagtatgacgagtccggcccctccatcgtccaccgcaaatgcttctaggcggactatgacttagttgcgttacaccctttcttgacaaaacctaacttgcgcagaaaacaagatgagattggcatggctttatttgttttttttgttttgttttggttttttttttttttttggcttgactcaggatttaaaaactggaacggtgaaggtgacagcagtcggttggagcgagcatcccccaaagttcacaatgtggccgaggactttgattgcacattgttgtttttttaatagtcattccaaatatgagatgcgttgttacaggaagtcccttgccatcctaaaagccaccccacttctctctaaggagaatggcccagtcctctcccaagtccacacaggggaggtgatagcattgctttcgtgtaaattatgtaatgcaaaatttttttaatcttcgccttaatacttttttattttgttttattttgaatgatgagccttcgtgcccccccttcccccttttttgtcccccaacttgagatgtatgaaggcttttggtctccctgggagtgggtggaggcagccagggcttacctgtacactgacttgagaccagttgaataaaagtgcacaccttaaaaatgaaccgccgagaccgcgtccgccccgcgagcacagagcctcgcctttgccgatccgccgcccgtccacacccgccgccagctcaccatggatgatgatatcgccgcgctcgtcgtcgacaacggctccggcatgtgcaaggccggcttcgcgggcgacgatgccccccgggccgtcttcccctccatcgtggggcgccccaggcaccagggcgtgatggtgggcatgggtcagaaggattcctatgtgggcgacgaggcccagagcaagagaggcatcctcaccctgaagtaccccatcgagcacggcatcgtcaccaactgggacgacatggagaaaatctggcaccacaccttctacaatgagctgcgtgtggctcccgaggagcaccccgtgctgctgaccgaggcccccctgaaccccaaggccaaccgcgagaagatgacccagatcatgtttgagaccttcaacaccccagccatgtacgttgctatccaggctgtgctatccctgtacgcctctggccgtaccactggcatcgtgatggactccggtgacggggtcacccacactgtgcccatctacgaggggtatgccctcccccatgccatcctgcgtctggacctggctggccgggacctgactgactacctcatgaagatcctcaccgagcgcggctacagcttcaccaccacggccgagcgggaaatcgtgcgtgacattaaggagaagctgtgctacgtcgccctggacttcgagcaagagatggccacggctgcttccagctcctccctggagaagagctacgagctgcctgacggccaggtcatcaccattggcaatgagcggttccgctgccctgaggcactcttccagccttccttcctgggcatggagtcctgtggcatccacgaaactaccttcaactccatcatgaagtgtgacgtggacatccgcaaagacctgtacgccaacacagtgctgtctggcggcaccaccatgtaccctggcattgccgacaggatgcagaaggagatcactgccctggcacccagcacaatgaagatcaagatcattgctcctcctgagcgcaagtactccgtgtggatcggcggctccatcctggcctcgctgtccaccttccagcagatgtggatcagcaagcaggagtatgacgagtccggcccctccatcgtccaccgcaaatgcttctaggcggactatgacttagttgcgttacaccctttcttgacaaaacctaacttgcgcagaaaacaagatgagattggcatggctttatttgttttttttgttttgttttggttttttttttttttttggcttgactcaggatttaaaaactggaacggtgaaggtgacagcagtcggttggagcgagcatcccccaaagttcacaatgtggccgaggactttgattgcacattgttgtttttttaatagtcattccaaatatgagatgcgttgttacaggaagtcccttgccatcctaaaagccaccccacttctctctaaggagaatggcccagtcctctcccaagtccacacaggggaggtgatagcattgctttcgtgtaaattatgtaatgcaaaatttttttaatcttcgccttaatacttttttattttgttttattttgaatgatgagccttcgtgcccccccttcccccttttttgtcccccaacttgagatgtatgaaggcttttggtctccctgggagtgggtggaggcagccagggcttacctgtacactgacttgagaccagttgaataaaagtgcacaccttaaaaatgaaccgccgagaccgcgtccgccccgcgagcacagagcctcgcctttgccgatccgccgcccgtccacacccgccgccagctcaccatggatgatgatatcgccgcgctcgtcgtcgacaacggctccggcatgtgcaaggccggcttcgcgggcgacgatgccccccgggccgtcttcccctccatcgtggggcgccccaggcaccagggcgtgatggtgggcatgggtcagaaggattcctatgtgggcgacgaggcccagagcaagagaggcatcctcaccctgaagtaccccatcgagcacggcatcgtcaccaactgggacgacatggagaaaatctggcaccacaccttctacaatgagctgcgtgtggctcccgaggagcaccccgtgctgctgaccgaggcccccctgaaccccaaggccaaccgcgagaagatgacccagatcatgtttgagaccttcaacaccccagccatgtacgttgctatccaggctgtgctatccctgtacgcctctggccgtaccactggcatcgtgatggactccggtgacggggtcacccacactgtgcccatctacgaggggtatgccctcccccatgccatcctgcgtctggacctggctggccgggacctgactgactacctcatgaagatcctcaccgagcgcggctacagcttcaccaccacggccgagcgggaaatcgtgcgtgacattaaggagaagctgtgctacgtcgccctggacttcgagcaagagatggccacggctgcttccagctcctccctggagaagagctacgagctgcctgacggccaggtcatcaccattggcaatgagcggttccgctgccctgaggcactcttccagccttccttcctgggcatggagtcctgtggcatccacgaaactaccttcaactccatcatgaagtgtgacgtggacatccgcaaagacctgtacgccaacacagtgctgtctggcggcaccaccatgtaccctggcattgccgacaggatgcagaaggagatcactgccctggcacccagcacaatgaagatcaagatcattgctcctcctgagcgcaagtactccgtgtggatcggcggctccatcctggcctcgctgtccaccttccagcagatgtggatcagcaagcaggagtatgacgagtccggcccctccatcgtccaccgcaaatgcttctaggcggactatgacttagttgcgttacaccctttcttgacaaaacctaacttgcgcagaaaacaagatgagattggcatggctttatttgttttttttgttttgttttggttttttttttttttttggcttgactcaggatttaaaaactggaacggtgaaggtgacagcagtcggttggagcgagcatcccccaaagttcacaatgtggccgaggactttgattgcacattgttgtttttttaatagtcattccaaatatgagatgcgttgttacaggaagtcccttgccatcctaaaagccaccccacttctctctaaggagaatggcccagtcctctcccaagtccacacaggggaggtgatagcattgctttcgtgtaaattatgtaatgcaaaatttttttaatcttcgccttaatacttttttattttgttttattttgaatgatgagccttcgtgcccccccttcccccttttttgtcccccaacttgagatgtatgaaggcttttggtctccctgggagtgggtggaggcagccagggcttacctgtacactgacttgagaccagttgaataaaagtgcacaccttaaaaatgaaccgccgagaccgcgtccgccccgcgagcacagagcctcgcctttgccgatccgccgcccgtccacacccgccgccagctcaccatggatgatgatatcgccgcgctcgtcgtcgacaacggctccggcatgtgcaaggccggcttcgcgggcgacgatgccccccgggccgtcttcccctccatcgtggggcgccccaggcaccagggcgtgatggtgggcatgggtcagaaggattcctatgtgggcgacgaggcccagagcaagagaggcatcctcaccctgaagtaccccatcgagcacggcatcgtcaccaactgggacgacatggagaaaatctggcaccacaccttctacaatgagctgcgtgtggctcccgaggagcaccccgtgctgctgaccgaggcccccctgaaccccaaggccaaccgcgagaagatgacccagatcatgtttgagaccttcaacaccccagccatgtacgttgctatccaggctgtgctatccctgtacgcctctggccgtaccactggcatcgtgatggactccggtgacggggtcacccacactgtgcccatctacgaggggtatgccctcccccatgccatcctgcgtctggacctggctggccgggacctgactgactacctcatgaagatcctcaccgagcgcggctacagcttcaccaccacggccgagcgggaaatcgtgcgtgacattaaggagaagctgtgctacgtcgccctggacttcgagcaagagatggccacggctgcttccagctcctccctggagaagagctacgagctgcctgacggccaggtcatcaccattggcaatgagcggttccgctgccctgaggcactcttccagccttccttcctgggcatggagtcctgtggcatccacgaaactaccttcaactccatcatgaagtgtgacgtggacatccgcaaagacctgtacgccaacacagtgctgtctggcggcaccaccatgtaccctggcattgccgacaggatgcagaaggagatcactgccctggcacccagcacaatgaagatcaagatcattgctcctcctgagcgcaagtactccgtgtggatcggcggctccatcctggcctcgctgtccaccttccagcagatgtggatcagcaagcaggagtatgacgagtccggcccctccatcgtccaccgcaaatgcttctaggcggactatgacttagttgcgttacaccctttcttgacaaaacctaacttgcgcagaaaacaagatgagattggcatggctttatttgttttttttgttttgttttggttttttttttttttttggcttgactcaggatttaaaaactggaacggtgaaggtgacagcagtcggttggagcgagcatcccccaaagttcacaatgtggccgaggactttgattgcacattgttgtttttttaatagtcattccaaatatgagatgcgttgttacaggaagtcccttgccatcctaaaagccaccccacttctctctaaggagaatggcccagtcctctcccaagtccacacaggggaggtgatagcattgctttcgtgtaaattatgtaatgcaaaatttttttaatcttcgccttaatacttttttattttgttttattttgaatgatgagccttcgtgcccccccttcccccttttttgtcccccaacttgagatgtatgaaggcttttggtctccctgggagtgggtggaggcagccagggcttacctgtacactgacttgagaccagttgaataaaagtgcacaccttaaaaatgaaccgccgagaccgcgtccgccccgcgagcacagagcctcgcctttgccgatccgccgcccgtccacacccgccgccagctcaccatggatgatgatatcgccgcgctcgtcgtcgacaacggctccggcatgtgcaaggccggcttcgcgggcgacgatgccccccgggccgtcttcccctccatcgtggggcgccccaggcaccagggcgtgatggtgggcatgggtcagaaggattcctatgtgggcgacgaggcccagagcaagagaggcatcctcaccctgaagtaccccatcgagcacggcatcgtcaccaactgggacgacatggagaaaatctggcaccacaccttctacaatgagctgcgtgtggctcccgaggagcaccccgtgctgctgaccgaggcccccctgaaccccaaggccaaccgcgagaagatgacccagatcatgtttgagaccttcaacaccccagccatgtacgttgctatccaggctgtgctatccctgtacgcctctggccgtaccactggcatcgtgatggactccggtgacggggtcacccacactgtgcccatctacgaggggtatgccctcccccatgccatcctgcgtctggacctggctggccgggacctgactgactacctcatgaagatcctcaccgagcgcggctacagcttcaccaccacggccgagcgggaaatcgtgcgtgacattaaggagaagctgtgctacgtcgccctggacttcgagcaagagatggccacggctgcttccagctcctccctggagaagagctacgagctgcctgacggccaggtcatcaccattggcaatgagcggttccgctgccctgaggcactcttccagccttccttcctgggcatggagtcctgtggcatccacgaaactaccttcaactccatcatgaagtgtgacgtggacatccgcaaagacctgtacgccaacacagtgctgtctggcggcaccaccatgtaccctggcattgccgacaggatgcagaaggagatcactgccctggcacccagcacaatgaagatcaagatcattgctcctcctgagcgcaagtactccgtgtggatcggcggctccatcctggcctcgctgtccaccttccagcagatgtggatcagcaagcaggagtatgacgagtccggcccctccatcgtccaccgcaaatgcttctaggcggactatgacttagttgcgttacaccctttcttgacaaaacctaacttgcgcagaaaacaagatgagattggcatggctttatttgttttttttgttttgttttggttttttttttttttttggcttgactcaggatttaaaaactggaacggtgaaggtgacagcagtcggttggagcgagcatcccccaaagttcacaatgtggccgaggactttgattgcacattgttgtttttttaatagtcattccaaatatgagatgcgttgttacaggaagtcccttgccatcctaaaagccaccccacttctctctaaggagaatggcccagtcctctcccaagtccacacaggggaggtgatagcattgctttcgtgtaaattatgtaatgcaaaatttttttaatcttcgccttaatacttttttattttgttttattttgaatgatgagccttcgtgcccccccttcccccttttttgtcccccaacttgagatgtatgaaggcttttggtctccctgggagtgggtggaggcagccagggcttacctgtacactgacttgagaccagttgaataaaagtgcacaccttaaaaatgaaccgccgagaccgcgtccgccccgcgagcacagagcctcgcctttgccgatccgccgcccgtccacacccgccgccagctcaccatggatgatgatatcgccgcgctcgtcgtcgacaacggctccggcatgtgcaaggccggcttcgcgggcgacgatgccccccgggccgtcttcccctccatcgtggggcgccccaggcaccagggcgtgatggtgggcatgggtcagaaggattcctatgtgggcgacgaggcccagagcaagagaggcatcctcaccctgaagtaccccatcgagcacggcatcgtcaccaactgggacgacatggagaaaatctggcaccacaccttctacaatgagctgcgtgtggctcccgaggagcaccccgtgctgctgaccgaggcccccctgaaccccaaggccaaccgcgagaagatgacccagatcatgtttgagaccttcaacaccccagccatgtacgttgctatccaggctgtgctatccctgtacgcctctggccgtaccactggcatcgtgatggactccggtgacggggtcacccacactgtgcccatctacgaggggtatgccctcccccatgccatcctgcgtctggacctggctggccgggacctgactgactacctcatgaagatcctcaccgagcgcggctacagcttcaccaccacggccgagcgggaaatcgtgcgtgacattaaggagaagctgtgctacgtcgccctggacttcgagcaagagatggccacggctgcttccagctcctccctggagaagagctacgagctgcctgacggccaggtcatcaccattggcaatgagcggttccgctgccctgaggcactcttccagccttccttcctgggcatggagtcctgtggcatccacgaaactaccttcaactccatcatgaagtgtgacgtggacatccgcaaagacctgtacgccaacacagtgctgtctggcggcaccaccatgtaccctggcattgccgacaggatgcagaaggagatcactgccctggcacccagcacaatgaagatcaagatcattgctcctcctgagcgcaagtactccgtgtggatcggcggctccatcctggcctcgctgtccaccttccagcagatgtggatcagcaagcaggagtatgacgagtccggcccctccatcgtccaccgcaaatgcttctaggcggactatgacttagttgcgttacaccctttcttgacaaaacctaacttgcgcagaaaacaagatgagattggcatggctttatttgttttttttgttttgttttggttttttttttttttttggcttgactcaggatttaaaaactggaacggtgaaggtgacagcagtcggttggagcgagcatcccccaaagttcacaatgtggccgaggactttgattgcacattgttgtttttttaatagtcattccaaatatgagatgcgttgttacaggaagtcccttgccatcctaaaagccaccccacttctctctaaggagaatggcccagtcctctcccaagtccacacaggggaggtgatagcattgctttcgtgtaaattatgtaatgcaaaatttttttaatcttcgccttaatacttttttattttgttttattttgaatgatgagccttcgtgcccccccttcccccttttttgtcccccaacttgagatgtatgaaggcttttggtctccctgggagtgggtggaggcagccagggcttacctgtacactgacttgagaccagttgaataaaagtgcacaccttaaaaatgaaccgccgagaccgcgtccgccccgcgagcacagagcctcgcctttgccgatccgccgcccgtccacacccgccgccagctcaccatggatgatgatatcgccgcgctcgtcgtcgacaacggctccggcatgtgcaaggccggcttcgcgggcgacgatgccccccgggccgtcttcccctccatcgtggggcgccccaggcaccagggcgtgatggtgggcatgggtcagaaggattcctatgtgggcgacgaggcccagagcaagagaggcatcctcaccctgaagtaccccatcgagcacggcatcgtcaccaactgggacgacatggagaaaatctggcaccacaccttctacaatgagctgcgtgtggctcccgaggagcaccccgtgctgctgaccgaggcccccctgaaccccaaggccaaccgcgagaagatgacccagatcatgtttgagaccttcaacaccccagccatgtacgttgctatccaggctgtgctatccctgtacgcctctggccgtaccactggcatcgtgatggactccggtgacggggtcacccacactgtgcccatctacgaggggtatgccctcccccatgccatcctgcgtctggacctggctggccgggacctgactgactacctcatgaagatcctcaccgagcgcggctacagcttcaccaccacggccgagcgggaaatcgtgcgtgacattaaggagaagctgtgctacgtcgccctggacttcgagcaagagatggccacggctgcttccagctcctccctggagaagagctacgagctgcctgacggccaggtcatcaccattggcaatgagcggttccgctgccctgaggcactcttccagccttccttcctgggcatggagtcctgtggcatccacgaaactaccttcaactccatcatgaagtgtgacgtggacatccgcaaagacctgtacgccaacacagtgctgtctggcggcaccaccatgtaccctggcattgccgacaggatgcagaaggagatcactgccctggcacccagcacaatgaagatcaagatcattgctcctcctgagcgcaagtactccgtgtggatcggcggctccatcctggcctcgctgtccaccttccagcagatgtggatcagcaagcaggagtatgacgagtccggcccctccatcgtccaccgcaaatgcttctaggcggactatgacttagttgcgttacaccctttcttgacaaaacctaacttgcgcagaaaacaagatgagattggcatggctttatttgttttttttgttttgttttggttttttttttttttttggcttgactcaggatttaaaaactggaacggtgaaggtgacagcagtcggttggagcgagcatcccccaaagttcacaatgtggccgaggactttgattgcacattgttgtttttttaatagtcattccaaatatgagatgcgttgttacaggaagtcccttgccatcctaaaagccaccccacttctctctaaggagaatggcccagtcctctcccaagtccacacaggggaggtgatagcattgctttcgtgtaaattatgtaatgcaaaatttttttaatcttcgccttaatacttttttattttgttttattttgaatgatgagccttcgtgcccccccttcccccttttttgtcccccaacttgagatgtatgaaggcttttggtctccctgggagtgggtggaggcagccagggcttacctgtacactgacttgagaccagttgaataaaagtgcacaccttaaaaatgaaccgccgagaccgcgtccgccccgcgagcacagagcctcgcctttgccgatccgccgcccgtccacacccgccgccagctcaccatggatgatgatatcgccgcgctcgtcgtcgacaacggctccggcatgtgcaaggccggcttcgcgggcgacgatgccccccgggccgtcttcccctccatcgtggggcgccccaggcaccagggcgtgatggtgggcatgggtcagaaggattcctatgtgggcgacgaggcccagagcaagagaggcatcctcaccctgaagtaccccatcgagcacggcatcgtcaccaactgggacgacatggagaaaatctggcaccacaccttctacaatgagctgcgtgtggctcccgaggagcaccccgtgctgctgaccgaggcccccctgaaccccaaggccaaccgcgagaagatgacccagatcatgtttgagaccttcaacaccccagccatgtacgttgctatccaggctgtgctatccctgtacgcctctggccgtaccactggcatcgtgatggactccggtgacggggtcacccacactgtgcccatctacgaggggtatgccctcccccatgccatcctgcgtctggacctggctggccgggacctgactgactacctcatgaagatcctcaccgagcgcggctacagcttcaccaccacggccgagcgggaaatcgtgcgtgacattaaggagaagctgtgctacgtcgccctggacttcgagcaagagatggccacggctgcttccagctcctccctggagaagagctacgagctgcctgacggccaggtcatcaccattggcaatgagcggttccgctgccctgaggcactcttccagccttccttcctgggcatggagtcctgtggcatccacgaaactaccttcaactccatcatgaagtgtgacgtggacatccgcaaagacctgtacgccaacacagtgctgtctggcggcaccaccatgtaccctggcattgccgacaggatgcagaaggagatcactgccctggcacccagcacaatgaagatcaagatcattgctcctcctgagcgcaagtactccgtgtggatcggcggctccatcctggcctcgctgtccaccttccagcagatgtggatcagcaagcaggagtatgacgagtccggcccctccatcgtccaccgcaaatgcttctaggcggactatgacttagttgcgttacaccctttcttgacaaaacctaacttgcgcagaaaacaagatgagattggcatggctttatttgttttttttgttttgttttggttttttttttttttttggcttgactcaggatttaaaaactggaacggtgaaggtgacagcagtcggttggagcgagcatcccccaaagttcacaatgtggccgaggactttgattgcacattgttgtttttttaatagtcattccaaatatgagatgcgttgttacaggaagtcccttgccatcctaaaagccaccccacttctctctaaggagaatggcccagtcctctcccaagtccacacaggggaggtgatagcattgctttcgtgtaaattatgtaatgcaaaatttttttaatcttcgccttaatacttttttattttgttttattttgaatgatgagccttcgtgcccccccttcccccttttttgtcccccaacttgagatgtatgaaggcttttggtctccctgggagtgggtggaggcagccagggcttacctgtacactgacttgagaccagttgaataaaagtgcacaccttaaaaatgaaccgccgagaccgcgtccgccccgcgagcacagagcctcgcctttgccgatccgccgcccgtccacacccgccgccagctcaccatggatgatgatatcgccgcgctcgtcgtcgacaacggctccggcatgtgcaaggccggcttcgcgggcgacgatgccccccgggccgtcttcccctccatcgtggggcgccccaggcaccagggcgtgatggtgggcatgggtcagaaggattcctatgtgggcgacgaggcccagagcaagagaggcatcctcaccctgaagtaccccatcgagcacggcatcgtcaccaactgggacgacatggagaaaatctggcaccacaccttctacaatgagctgcgtgtggctcccgaggagcaccccgtgctgctgaccgaggcccccctgaaccccaaggccaaccgcgagaagatgacccagatcatgtttgagaccttcaacaccccagccatgtacgttgctatccaggctgtgctatccctgtacgcctctggccgtaccactggcatcgtgatggactccggtgacggggtcacccacactgtgcccatctacgaggggtatgccctcccccatgccatcctgcgtctggacctggctggccgggacctgactgactacctcatgaagatcctcaccgagcgcggctacagcttcaccaccacggccgagcgggaaatcgtgcgtgacattaaggagaagctgtgctacgtcgccctggacttcgagcaagagatggccacggctgcttccagctcctccctggagaagagctacgagctgcctgacggccaggtcatcaccattggcaatgagcggttccgctgccctgaggcactcttccagccttccttcctgggcatggagtcctgtggcatccacgaaactaccttcaactccatcatgaagtgtgacgtggacatccgcaaagacctgtacgccaacacagtgctgtctggcggcaccaccatgtaccctggcattgccgacaggatgcagaaggagatcactgccctggcacccagcacaatgaagatcaagatcattgctcctcctgagcgcaagtactccgtgtggatcggcggctccatcctggcctcgctgtccaccttccagcagatgtggatcagcaagcaggagtatgacgagtccggcccctccatcgtccaccgcaaatgcttctaggcggactatgacttagttgcgttacaccctttcttgacaaaacctaacttgcgcagaaaacaagatgagattggcatggctttatttgttttttttgttttgttttggttttttttttttttttggcttgactcaggatttaaaaactggaacggtgaaggtgacagcagtcggttggagcgagcatcccccaaagttcacaatgtggccgaggactttgattgcacattgttgtttttttaatagtcattccaaatatgagatgcgttgttacaggaagtcccttgccatcctaaaagccaccccacttctctctaaggagaatggcccagtcctctcccaagtccacacaggggaggtgatagcattgctttcgtgtaaattatgtaatgcaaaatttttttaatcttcgccttaatacttttttattttgttttattttgaatgatgagccttcgtgcccccccttcccccttttttgtcccccaacttgagatgtatgaaggcttttggtctccctgggagtgggtggaggcagccagggcttacctgtacactgacttgagaccagttgaataaaagtgcacaccttaaaaatgaaccgccgagaccgcgtccgccccgcgagcacagagcctcgcctttgccgatccgccgcccgtccacacccgccgccagctcaccatggatgatgatatcgccgcgctcgtcgtcgacaacggctccggcatgtgcaaggccggcttcgcgggcgacgatgccccccgggccgtcttcccctccatcgtggggcgccccaggcaccagggcgtgatggtgggcatgggtcagaaggattcctatgtgggcgacgaggcccagagcaagagaggcatcctcaccctgaagtaccccatcgagcacggcatcgtcaccaactgggacgacatggagaaaatctggcaccacaccttctacaatgagctgcgtgtggctcccgaggagcaccccgtgctgctgaccgaggcccccctgaaccccaaggccaaccgcgagaagatgacccagatcatgtttgagaccttcaacaccccagccatgtacgttgctatccaggctgtgctatccctgtacgcctctggccgtaccactggcatcgtgatggactccggtgacggggtcacccacactgtgcccatctacgaggggtatgccctcccccatgccatcctgcgtctggacctggctggccgggacctgactgactacctcatgaagatcctcaccgagcgcggctacagcttcaccaccacggccgagcgggaaatcgtgcgtgacattaaggagaagctgtgctacgtcgccctggacttcgagcaagagatggccacggctgcttccagctcctccctggagaagagctacgagctgcctgacggccaggtcatcaccattggcaatgagcggttccgctgccctgaggcactcttccagccttccttcctgggcatggagtcctgtggcatccacgaaactaccttcaactccatcatgaagtgtgacgtggacatccgcaaagacctgtacgccaacacagtgctgtctggcggcaccaccatgtaccctggcattgccgacaggatgcagaaggagatcactgccctggcacccagcacaatgaagatcaagatcattgctcctcctgagcgcaagtactccgtgtggatcggcggctccatcctggcctcgctgtccaccttccagcagatgtggatcagcaagcaggagtatgacgagtccggcccctccatcgtccaccgcaaatgcttctaggcggactatgacttagttgcgttacaccctttcttgacaaaacctaacttgcgcagaaaacaagatgagattggcatggctttatttgttttttttgttttgttttggttttttttttttttttggcttgactcaggatttaaaaactggaacggtgaaggtgacagcagtcggttggagcgagcatcccccaaagttcacaatgtggccgaggactttgattgcacattgttgtttttttaatagtcattccaaatatgagatgcgttgttacaggaagtcccttgccatcctaaaagccaccccacttctctctaaggagaatggcccagtcctctcccaagtccacacaggggaggtgatagcattgctttcgtgtaaattatgtaatgcaaaatttttttaatcttcgccttaatacttttttattttgttttattttgaatgatgagccttcgtgcccccccttcccccttttttgtcccccaacttgagatgtatgaaggcttttggtctccctgggagtgggtggaggcagccagggcttacctgtacactgacttgagaccagttgaataaaagtgcacaccttaaaaatgaaccgccgagaccgcgtccgccccgcgagcacagagcctcgcctttgccgatccgccgcccgtccacacccgccgccagctcaccatggatgatgatatcgccgcgctcgtcgtcgacaacggctccggcatgtgcaaggccggcttcgcgggcgacgatgccccccgggccgtcttcccctccatcgtggggcgccccaggcaccagggcgtgatggtgggcatgggtcagaaggattcctatgtgggcgacgaggcccagagcaagagaggcatcctcaccctgaagtaccccatcgagcacggcatcgtcaccaactgggacgacatggagaaaatctggcaccacaccttctacaatgagctgcgtgtggctcccgaggagcaccccgtgctgctgaccgaggcccccctgaaccccaaggccaaccgcgagaagatgacccagatcatgtttgagaccttcaacaccccagccatgtacgttgctatccaggctgtgctatccctgtacgcctctggccgtaccactggcatcgtgatggactccggtgacggggtcacccacactgtgcccatctacgaggggtatgccctcc

SEQ ID NO: 1002 - DNA, 9590 bp, Homo sapiens
  misc_feature (468)..(468): second gene starts at position 468
atggtgttcaggcgcttcgtggaggttggccgggtggcctatgtctcctttggacctcatgccggaaaattggtcgcgattgtagatgttattgatcagaacagggctttggtcgatggaccttgcactcaagtgaggagacaggccatgcctttcaagtgcatgcagctcactgatttcatcctcaagtttccgcacagtgcccaccagaagtatgtccgacaagcctggcagaaggcagacatcaatacaaaatgggcagccacacgatgggccaagaagattgaagccagagaaaggaaagccaagatgacagattttgatcgttttaaagttatgaaggcaaagaaaatgaggaacagaataatcaagaatgaagttaagaagcttcaaaaggcagctctcctgaaagcttctcccaaaaaagcacctggtactaagggtactgctgctgctgctgctgctgcggccaacatgggcagtctgagccagacgccgggacacaaggctgagcagcagcagcagcagcagcagcagcagcagcagcagcatcagcatcagcagcagcagcagcagcagcagcagcagcagcagcagcagcacctcagcagggctccggggctcatcaccccggggtcccccccaccagcccagcagaaccagtacgtccacatttccagttctccgcagaacaccggccgcaccgcctctcctccggccatccccgtccacctccacccccaccagacgatgatcccacacacgctcaccctggggcccccctcccaggtcgtcatgcaatacgccgactccggcagccactttgtccctcgggaggccaccaagaaagctgagagcagccggctgcagcaggccatccaggccaaggaggtcctgaacggtgagatggagaagagccggcggtacggggccccgtcctcagccgacctgggcctgggcaaggcaggcggcaagtcggttcctcacccgtacgagtccaggcacgtggtggtccacccgagcccctcagactacagcagtcgtgatccttcgggggtccgggcctctgtgatggtcctgcccaacagcaacacgcccgcagctgacctggaggtgcaacaggccactcatcgtgaagcctccccttctaccctcaacgacaaaagtggcctgcatttagggaagcctggccaccggtcctacgcgctctcaccccacacggtcattcagaccacacacagtgcttcagagccactcccggtgggactgccagccacggccttctacgcagggactcaaccccctgtcatcggctacctgagcggccagcagcaagcaatcacctacgccggcagcctgccccagcacctggtgatccccggcacacagcccctgctcatcccggtcggcagcactgacatggaagcgtcgggggcagccccggccatagtcacgtcatccccccagtttgctgcagtgcctcacacgttcgtcaccaccgcccttcccaagagcgagaacttcaaccctgaggccctggtcacccaggccgcctacccagccatggtgcaggcccagatccacctgcctgtggtgcagtccgtggcctccccggcggcggctccccctacgctgcctccctacttcatgaaaggctccatcatccagttggccaacggggagctaaagaaggtggaagacttaaaaacagaagatttcatccagagtgcagagataagcaacgacctgaagatcgactccagcaccgtagagaggattgaagacagccatagcccgggcgtggccgtgatacagttcgccgtcggggagcaccgagcccaggtcagcgttgaagttttggtagagtatcctttttttgtgtttggacagggctggtcatcctgctgtccggagagaaccagccagctctttgatttgccgtgttccaaactctcagttggggatgtctgcatctcgcttaccctcaagaacctgaagaacggctctgttaaaaagggccagcccgtggatcccgccagcgtcctgctgaagcactcaaaggccgacggcctggcgggcagcagacacaggtatgccgagcaggaaaacggaatcaaccaggggagtgcccagatgctctctgagaatggcgaactgaagtttccagagaaaatgggattgcctgcagcgcccttcctcaccaaaatagaacccagcaagcccgcggcaacgaggaagaggaggtggtcggcgccagagagccgcaaactggagaagtcagaagacgaaccacctttgactcttcctaagccttctctaattcctcaggaggttaagatttgcattgaaggccggtctaatgtaggcaagtagaggcagcgtgggggaaaggaaacgtggctctcccttatcatttgtatccagattactgtactgtaggctaaaataacacagtatttacatgttatcttcttaattttaggtttctgttctaaccttgtcattagagttacagcaggtgtgtcgcaggagactggtgcatatgctttttccacgagtgtctgtcagtgagcgggcgggaggaagggcacagcaggagcggtcagggctccaggcatccccggggaagaaaggaacggggcttcacagtgcctgccttctctagcggcacagaagcagccgggggcgctgactcccgctagtgtcaggagaaaagtcccgtgggaagggtcctgcaggggtgcagggttgcacgcatgtgggggtgcacaggcgctgtggcggcgagtgagggtctctttttctctgcctccctctgcctcactctcttgctatcggcatgggccgggggggttcagagcagtgtcctcctggggttcccacgtgcaaaatcaacatcaggaacccagcttcagggcatcgcggagacgcgtcagatggcagatttggaaagttaaccatttaaaagaacatttttctctccaacatattttacaataaaagcaacttttaattgtatagatatatatttccccctatggggcctgactgcactgatatatattttttttaaagagcaactgccacatgcgggatttcatttctgctttttactagtgcagcgatgtcaccagggtgttgtggtggacagggaagcccctgctgtcatggccccacatggggtaaggggggttgggggtgggggagagggagagagcgaacacccacgctggtttctgtgcagtgttaggaaaaccaatcaggttattgcattgacttcactcccaagaggtagatgcaaactgcccttcagtgagagcaacagaagctcttcacgttgagtttgcgaaatctttttgtctttgaactctagtactgtttatagttcatgactatggacaactcgggtgccactttttttttttttcagattccagtgtgacatgaggaattagattttgaagatgagcatatattactatctttaagcatttaaaaatactgttcacactttattaccaagcatcttggtctctcattcaacaagtactgtatctcactttaaactctttggggaaaaaacaaaaacaaaaaaaactaagttgctttctttttttcaacactgtaactacatttcagctctgcagaattgctgaagagcaagatattgaaagtttcaatgtggtttaaagggatgaatgtgaattatgaactagtatgtgacaataaatgaccaccaagtactacctgacgggaggcacttttcactttgatgtctgagaatcagttcaaggcatatgcagagttggcagagaaactgagagaaaagggatggagaagagaatactcatttttgtccagtgtttttctttttaagatgaacttttaaagaaccttgcgatttgcacatattgagtttataacttgtgtgatattcctgcagtttttatccaataacattgtgggaaaggtttgggggactgaacgagcataaataaatgtagcaaaatttctttctaacctgcctaaactctaggccattttataaggttatgttcctttgaaaattcattttggtctttttaccacatctgtcacaaaaagccaggtcttagcgggctcttagaaactctgagaattttcttcagattcattgagagagttttccataaagacatttatatatgtgagcaagattttttttaaacaattactttattattgttgttattaatgttattttcagaatggcttttttttttctattcaaaatcaaatcgagatttaatgtttggtacaaacccagaaagggtatttcatagtttttaaacctttcattcccagagatccgaaatatcatttgtgggttttgaatgcatctttaaagtgctttaaaaaaaagttttataagtagggagaaatttttaaatattcttacttggatggctgcaactaaactgaacaaatacctgacttttcttttaccccattgaaaatagtactttcttcgtttcacaaattaaaaaaaaaatctggtatcaacccacattttggctgtctagtattcatttacatttagggttcaccaggactaatgatttttataaaccgttttctggggtgtaccaaaaacatttgaataggtttagaatagctagaatagttccttgactttcctcgaatttcattaccctctcagcatgcttgcagagagctgggtgggctcattcttgcagtcatactgcttatttagtgctgtattttttaaacgtttctgttcagagaacttgcttaatcttccatatattctgctcagggcacttgcaattattaggttttgtttttctttttgttttttagcctttgatggtaagaggaatacgggctgccacatagactttgttctcattaatatcactatttacaactcatgtggactcagaaaaacacacaccaccttttggcttacttcgagtattgaattgactggatccactaaaccaacactaagatgggaaaacacacatggtttggagcaataggaacatcatcataatttttgtggttctatttcaggtataggaattataaaataattggttctttctaaacacttgtcccatttcattctcttgcttttttagcatgtgcaatactttctgtgccaatagagtctgaccagtgtgctatatagttaaagctcattcccttttggctttttccttgtttggttgatcttccccattctggccagagcagggctggagggaaggagccaggagggagagagcctcccacctttcccctgctgcggatgctgagtgctggggcggggagccttcaggagccccgtgcgtctgccgccacgttgcagaaagagccagccaaggagacccgggggaggaaccgcagtgtcccctgtcaccacacggaatagtgaatgtggagtgtggagaggaaggaggcagattcatttctaagacgcactctggagccatgtagcctggagtcaacccattttccacggtcttttctgcaagtgggcaggcccctcctcggggtctgtgtccttgagacttggagccctgcctctgagcctggacgggaagtgtggcctgttgtgtgtgtgcgttctgagcgtgttggccagtggctgtggaggggaccacctgccacccacggtcaccactcccttgtggcagctttctcttcaaataggaagaacgcacagagggcaggagcctcctgtttgcagacgttggcgggccccgaggctcccagagcagcctctgtcaccgcttctgtgtagcaaacattaacgatgacaggggtagaaattcttcggtgccgttcagcttacaaggatcagccatgtgcctctgtactatgtccactttgcaatatttaccgacagccgtcttttgttctttctttcctgttttccatttttaaactagtaacagcaggccttttgcgtttacaatggaacacaatcaccaagaaattagtcagggcgaaaagaaaaaaataatactattaataagaaaccaacaaacaagaacctctctttctagggatttctaaatatataaaatgactgttccttagaatgtttaacttaagaattatttcagtttgtctgggccacactggggcagaggggggagggagggatacagagatggatgccacttacctcagatcttttaaagtggaaatccaaattgaattttcatttggactttcaggataattttctatgttggtcaacttttcgttttccctaactcacccagtttagtttgggatgatttgatttctgttgttgttgatcccatttctaacttggaattgtgagcctctatgttttctgttaggtgagtgtgttgggttttttccccccaccaggaagtggcagcatccctccttctcccctaaagggactctgcggaacctttcacacctctttctcagggacggggcaggtgtgtgtgtggtacactgacgtgtccagaagcagcactttgactgctctggagtagggttgtacaatttcaaggaatgtttggatttcctgcatcttgtggattactccttagataccgcatagattgcaatataatgctgcatgttcaagatgaacagtagctcctagtaatcataaaatccactctttgcacagtttgatctttactgaaatatgttgccaaaatttatttttgttgttgtagctctggattttgttttgttttgttttttaaggaaacgattgacaataccctttaacatctgtgactactaaggaaacctatttctttcatagagagaaaaatctccaatgcttttgaagacactaataccgtgctatttcagatatgggtgaggaagcagagctctcggtaccgaaggccgggcttcttgagctgtgttggttgtcatggctactgtttcatgaaccacaagcagctcaacagactggtctgttgccttctgaaaccctttgcacttcaatttgcaccaggtgaaaacagggccagcagactccatggcccaattcggtttcttcggtggtgatgtgaaaggagagaattacactttttttttttttaagtggcgtggaggcctttgcttccacatttgtttttaacccagaatttctgaaatagagaatttaagaacacatcaagtaataaatatacagagaatatacttttttataaagcacatgcatctgctattgtgttgggttggtttcctctcttttccacggacagtgttgtgtttctggcatagggaaactccaaacaacttgcacacctctactccggagctgagatttcttttacatagatgacctcgcttcaaatacgttaccttactgatgataggatcttttcttgtagcactataccttgtgggaatttttttttaaatgtacacctgatttgagaagctgaagaaaacaaaattttgaagcactcactttgaggagtacaggtaatgttttaaaaaattgcacaaaagaaaaatgaatgtcgaaatgattcattcagtgtttgaaagatatggctctgttgaaacaatgagtttcatactttgtttgtaaaaaaaaaaaagcagagaagggttgaaagttacatgtttttttgtatatagaaatttgtcatgtctaaatgatcagatttgtatggttatggcctggaagaattactacgtaaaaggctcttaaactatacctatgcttattgttatttttgttacatatagccctcgtctgagggaggggaactcggtattctgcgatttgagaatactgttcattcctatgctgaaagtacttctctgagctcccttcttagtctaaactcttaagccattgcaacttctttttcttcagagatgatgtttgacattttcagcacttcctgttcctataaacccaaagaatataatcttgaacacgaagtgtttgtaacaagggatccaggctaccaatcaaacaggactcattatggggacaaaaaaaaaaattatttcaccttctttccccccacacctcatttaaatggggggagtaaaaacatgatttcaatgtaaatgcctcattttattttagttttattttgatttttatttaatataaagaggccagaataaatacggagcatcttctcagaatagtattcctgtccaaaaatcaagccggacagtggaaactggacagctgtggggatattaagcacccccacttacaattcttaaattcagaatctcgtcccctcccttctcgttgaaggcaactgttctggtagctaactttctcctgtgtaatggcgggagggaacaccggcttcagtttttcatgtccccatgacttgcatacaaatggttcaactgtattaaaattaagtgcatttggccaataggtagtatctatacaataacaacaatctctaagaatttccataacttttcttatctgaaaggactcaagtcttccactgcagatacattggaggcttcacccacgttttctttccctttagtttgtttgctgtctggatggccaatgagcctgtctccttttctgtggccaatctgaaggccttcgttggaagtgttgtttacagtaatccttaccaagataacatactgtcctccagaataccaagtattaggtgacactagctcaagctgttgtcttcagagcagttaccaagaagctcggtgcacaggttttctctggttcttacaggaaccacctactctttcagttttctggcccaggagtggggtaaatcctttagttagtgcatttgaacttgatacctgtgcattcagttctgtgaatactgccctttttggcggggtttcctcatctccccagcctgaactgctcaactctaaacccaaattagtgtcagccgaaaggaggtttcaagatagtcctgtcagtatttgtggtgaccttcagattagacagtcttcatttccagccagtggagtcctggctccagagccatctctgagactcgtactactggatgttttaatatcagatcattacccaccatatgcctcccacaggccaagggaaaacagacaccagaacttgggttgagggcactaccagactgacatggccagtacagaggagaactagggaaggaatgatgttttgcaccttattgaaaagaaaattttaagtgcatacataatagttaagagcttttattgtgacaggagaacttttttccatatgcgtgcatactctctgtaattccagtgtaaaatattgtacttgcactagcttttttaaacaaatattaaaaaatggaagaattcatattctattttctaatcgtggtgtgtctatttgtaggatacactcgagtctgtttattgaattttatggtccctttctttgatggtgcttgcaggttttctaggtagaaattatttcattattataataaaacaatgtttgattcaaaatttgaacaaaattgttttaaataaattgtctgtataccagtacaagtttattgtttcagtatactcgtactaataaaataacagtgccaattgca

SEQ ID NO: 1003 - DNA, 9590 bp, Homo sapiens; identical to SEQ ID NO: 1002
  misc_feature (468)..(468): second gene starts at position 468

SEQ ID NO: 1004 - DNA, 9590 bp, Homo sapiens; identical to SEQ ID NO: 1002
  misc_feature (468)..(468): second gene starts at position 468

SEQ ID NO: 1005 - DNA, 9590 bp, Homo sapiens; identical to SEQ ID NO: 1002
  misc_feature (468)..(468): second gene starts at position 468

SEQ ID NO: 1006 - DNA, 9549 bp, Homo sapiens
  misc_feature (470)..(470): second gene starts at position 470
atggtgttcaggcgcttcgtggaggttggccgggtggcctatgtctcctttggacctcatgccggaaaattggtcgcgattgtagatgttattgatcagaacagggctttggtcgatggaccttgcactcaagtgaggagacaggccatgcctttcaagtgcatgcagctcactgatttcatcctcaagtttccgcacagtgcccaccagaagtatgtccgacaagcctggcagaaggcagacatcaatacaaaatgggcagccacacgatgggccaagaagattgaagccagagaaaggaaagccaagatgacagattttgatcgttttaaagttatgaaggcaaagaaaatgaggaacagaataatcaagaatgaagttaagaagcttcaaaaggcagctctcctgaaagcttctcccaaaaaagcacctggtactaagggtactgctgctgctgctgctgctgctggagcagcagcagcagcagcagcagcagcagcagcagcagcatcagcatcagcagcagcagcagcagcagcagcagcagcagcagcagcagcacctcagcagggctccggggctcatcaccccggggtcccccccaccagcccagcagaaccagtacgtccacatttccagttctccgcagaacaccggccgcaccgcctctcctccggccatccccgtccacctccacccccaccagacgatgatcccacacacgctcaccctggggcccccctcccaggtcgtcatgcaatacgccgactccggcagccactttgtccctcgggaggccaccaagaaagctgagagcagccggctgcagcaggccatccaggccaaggaggtcctgaacggtgagatggagaagagccggcggtacggggccccgtcctcagccgacctgggcctgggcaaggcaggcggcaagtcggttcctcacccgtacgagtccaggcacgtggtggtccacccgagcccctcagactacagcagtcgtgatccttcgggggtccgggcctctgtgatggtcctgcccaacagcaacacgcccgcagctgacctggaggtgcaacaggccactcatcgtgaagcctccccttctaccctcaacgacaaaagtggcctgcatttagggaagcctggccaccggtcctacgcgctctcaccccacacggtcattcagaccacacacagtgcttcagagccactcccggtgggactgccagccacggccttctacgcagggactcaaccccctgtcatcggctacctgagcggccagcagcaagcaatcacctacgccggcagcctgccccagcacctggtgatccccggcacacagcccctgctcatcccggtcggcagcactgacatggaagcgtcgggggcagccccggccatagtcacgtcatccccccagtttgctgcagtgcctcacacgttcgtcaccaccgcccttcccaagagcgagaacttcaaccctgaggccctggtcacccaggccgcctacccagccatggtgcaggcccagatccacctgcctgtggtgcagtccgtggcctccccggcggcggctccccctacgctgcctccctacttcatgaaaggctccatcatccagttggccaacggggagctaaagaaggtggaagacttaaaaacagaagatttcatccagagtgcagagataagcaacgacctgaagatcgactccagcaccgtagagaggattgaagacagccatagcccgggcgtggccgtgatacagttcgccgtcggggagcaccgagcccaggtcagcgttgaagttttggtagagtatcctttttttgtgtttggacagggctggtcatcctgctgtccggagagaaccagccagctctttgatttgccgtgttccaaactctcagttggggatgtctgcatctcgcttaccctcaagaacctgaagaacggctctgttaaaaagggccagcccgtggatcccgccagcgtcctgctgaagcactcaaaggccgacggcctggcgggcagcagacacaggtatgccgagcaggaaaacggaatcaaccaggggagtgcccagatgctctctgagaatggcgaactgaagtttccagagaaaatgggattgcctgcagcgcccttcctcaccaaaatagaacccagcaagcccgcggcaacgaggaagaggaggtggtcggcgccagagagccgcaaactggagaagtcagaagacgaaccacctttgactcttcctaagccttctctaattcctcaggaggttaagatttgcattgaaggccggtctaatgtaggcaagtagaggcagcgtgggggaaaggaaacgtggctctcccttatcatttgtatccagattactgtactgtaggctaaaataacacagtatttacatgttatcttcttaattttaggtttctgttctaaccttgtcattagagttacagcaggtgtgtcgcaggagactggtgcatatgctttttccacgagtgtctgtcagtgagcgggcgggaggaagggcacagcaggagcggtcagggctccaggcatccccggggaagaaaggaacggggcttcacagtgcctgccttctctagcggcacagaagcagccgggggcgctgactcccgctagtgtcaggagaaaagtcccgtgggaagggtcctgcaggggtgcagggttgcacgcatgtgggggtgcacaggcgctgtggcggcgagtgagggtctctttttctctgcctccctctgcctcactctcttgctatcggcatgggccgggggggttcagagcagtgtcctcctggggttcccacgtgcaaaatcaacatcaggaacccagcttcagggcatcgcggagacgcgtcagatggcagatttggaaagttaaccatttaaaagaacatttttctctccaacatattttacaataaaagcaacttttaattgtatagatatatatttccccctatggggcctgactgcactgatatatattttttttaaagagcaactgccacatgcgggatttcatttctgctttttactagtgcagcgatgtcaccagggtgttgtggtggacagggaagcccctgctgtcatggccccacatggggtaaggggggttgggggtgggggagagggagagagcgaacacccacgctggtttctgtgcagtgttaggaaaaccaatcaggttattgcattgacttcactcccaagaggtagatgcaaactgcccttcagtgagagcaacagaagctcttcacgttgagtttgcgaaatctttttgtctttgaactctagtactgtttatagttcatgactatggacaactcgggtgccactttttttttttttcagattccagtgtgacatgaggaattagattttgaagatgagcatatattactatctttaagcatttaaaaatactgttcacactttattaccaagcatcttggtctctcattcaacaagtactgtatctcactttaaactctttggggaaaaaacaaaaacaaaaaaaactaagttgctttctttttttcaacactgtaactacatttcagctctgcagaattgctgaagagcaagatattgaaagtttcaatgtggtttaaagggatgaatgtgaattatgaactagtatgtgacaataaatgaccaccaagtactacctgacgggaggcacttttcactttgatgtctgagaatcagttcaaggcatatgcagagttggcagagaaactgagagaaaagggatggagaagagaatactcatttttgtccagtgtttttctttttaagatgaacttttaaagaaccttgcgatttgcacatattgagtttataacttgtgtgatattcctgcagtttttatccaataacattgtgggaaaggtttgggggactgaacgagcataaataaatgtagcaaaatttctttctaacctgcctaaactctaggccattttataaggttatgttcctttgaaaattcattttggtctttttaccacatctgtcacaaaaagccaggtcttagcgggctcttagaaactctgagaattttcttcagattcattgagagagttttccataaagacatttatatatgtgagcaagattttttttaaacaattactttattattgttgttattaatgttattttcagaatggcttttttttttctattcaaaatcaaatcgagatttaatgtttggtacaaacccagaaagggtatttcatagtttttaaacctttcattcccagagatccgaaatatcatttgtgggttttgaatgcatctttaaagtgctttaaaaaaaagttttataagtagggagaaatttttaaatattcttacttggatggctgcaactaaactgaacaaatacctgacttttcttttaccccattgaaaatagtactttcttcgtttcacaaattaaaaaaaaaatctggtatcaacccacattttggctgtctagtattcatttacatttagggttcaccaggactaatgatttttataaaccgttttctggggtgtaccaaaaacatttgaataggtttagaatagctagaatagttccttgactttcctcgaatttcattaccctctcagcatgcttgcagagagctgggtgggctcattcttgcagtcatactgcttatttagtgctgtattttttaaacgtttctgttcagagaacttgcttaatcttccatatattctgctcagggcacttgcaattattaggttttgtttttctttttgttttttagcctttgatggtaagaggaatacgggctgccacatagactttgttctcattaatatcactatttacaactcatgtggactcagaaaaacacacaccaccttttggcttacttcgagtattgaattgactggatccactaaaccaacactaagatgggaaaacacacatggtttggagcaataggaacatcatcataatttttgtggttctatttcaggtataggaattataaaataattggttctttctaaacacttgtcccatttcattctcttgcttttttagcatgtgcaatactttctgtgccaatagagtctgaccagtgtgctatatagttaaagctcattcccttttggctttttccttgtttggttgatcttccccattctggccagagcagggctggagggaaggagccaggagggagagagcctcccacctttcccctgctgcggatgctgagtgctggggcggggagccttcaggagccccgtgcgtctgccgccacgttgcagaaagagccagccaaggagacccgggggaggaaccgcagtgtcccctgtcaccacacggaatagtgaatgtggagtgtggagaggaaggaggcagattcatttctaagacgcactctggagccatgtagcctggagtcaacccattttccacggtcttttctgcaagtgggcaggcccctcctcggggtctgtgtccttgagacttggagccctgcctctgagcctggacgggaagtgtggcctgttgtgtgtgtgcgttctgagcgtgttggccagtggctgtggaggggaccacctgccacccacggtcaccactcccttgtggcagctttctcttcaaataggaagaacgcacagagggcaggagcctcctgtttgcagacgttggcgggccccgaggctcccagagcagcctctgtcaccgcttctgtgtagcaaacattaacgatgacaggggtagaaattcttcggtgccgttcagcttacaaggatcagccatgtgcctctgtactatgtccactttgcaatatttaccgacagccgtcttttgttctttctttcctgttttccatttttaaactagtaacagcaggccttttgcgtttacaatggaacacaatcaccaagaaattagtcagggcgaaaagaaaaaaataatactattaataagaaaccaacaaacaagaacctctctttctagggatttctaaatatataaaatgactgttccttagaatgtttaacttaagaattatttcagtttgtctgggccacactggggcagaggggggagggagggatacagagatggatgccacttacctcagatcttttaaagtggaaatccaaattgaattttcatttggactttcaggataattttctatgttggtcaacttttcgttttccctaactcacccagtttagtttgggatgatttgatttctgttgttgttgatcccatttctaacttggaattgtgagcctctatgttttctgttaggtgagtgtgttgggttttttccccccaccaggaagtggcagcatccctccttctcccctaaagggactctgcggaacctttcacacctctttctcagggacggggcaggtgtgtgtgtggtacactgacgtgtccagaagcagcactttgactgctctggagtagggttgtacaatttcaaggaatgtttggatttcctgcatcttgtggattactccttagataccgcatagattgcaatataatgctgcatgttcaagatgaacagtagctcctagtaatcataaaatccactctttgcacagtttgatctttactgaaatatgttgccaaaatttatttttgttgttgtagctctggattttgttttgttttgttttttaaggaaacgattgacaataccctttaacatctgtgactactaaggaaacctatttctttcatagagagaaaaatctccaatgcttttgaagacactaataccgtgctatttcagatatgggtgaggaagcagagctctcggtaccgaaggccgggcttcttgagctgtgttggttgtcatggctactgtttcatgaaccacaagcagctcaacagactggtctgttgccttctgaaaccctttgcacttcaatttgcaccaggtgaaaacagggccagcagactccatggcccaattcggtttcttcggtggtgatgtgaaaggagagaattacactttttttttttttaagtggcgtggaggcctttgcttccacatttgtttttaacccagaatttctgaaatagagaatttaagaacacatcaagtaataaatatacagagaatatacttttttataaagcacatgcatctgctattgtgttgggttggtttcctctcttttccacggacagtgttgtgtttctggcatagggaaactccaaacaacttgcacacctctactccggagctgagatttcttttacatagatgacctcgcttcaaatacgttaccttactgatgataggatcttttcttgtagcactataccttgtgggaatttttttttaaatgtacacctgatttgagaagctgaagaaaacaaaattttgaagcactcactttgaggagtacaggtaatgttttaaaaaattgcacaaaagaaaaatgaatgtcgaaatgattcattcagtgtttgaaagatatggctctgttgaaacaatgagtttcatactttgtttgtaaaaaaaaaaaagcagagaagggttgaaagttacatgtttttttgtatatagaaatttgtcatgtctaaatgatcagatttgtatggttatggcctggaagaattactacgtaaaaggctcttaaactatacctatgcttattgttatttttgttacatatagccctcgtctgagggaggggaactcggtattctgcgatttgagaatactgttcattcctatgctgaaagtacttctctgagctcccttcttagtctaaactcttaagccattgcaacttctttttcttcagagatgatgtttgacattttcagcacttcctgttcctataaacccaaagaatataatcttgaacacgaagtgtttgtaacaagggatccaggctaccaatcaaacaggactcattatggggacaaaaaaaaaaattatttcaccttctttccccccacacctcatttaaatggggggagtaaaaacatgatttcaatgtaaatgcctcattttattttagttttattttgatttttatttaatataaagaggccagaataaatacggagcatcttctcagaatagtattcctgtccaaaaatcaagccggacagtggaaactggacagctgtggggatattaagcacccccacttacaattcttaaattcagaatctcgtcccctcccttctcgttgaaggcaactgttctggtagctaactttctcctgtgtaatggcgggagggaacaccggcttcagtttttcatgtccccatgacttgcatacaaatggttcaactgtattaaaattaagtgcatttggccaataggtagtatctatacaataacaacaatctctaagaatttccataacttttcttatctgaaaggactcaagtcttccactgcagatacattggaggcttcacccacgttttctttccctttagtttgtttgctgtctggatggccaatgagcctgtctccttttctgtggccaatctgaaggccttcgttggaagtgttgtttacagtaatccttaccaagataacatactgtcctccagaataccaagtattaggtgacactagctcaagctgttgtcttcagagcagttaccaagaagctcggtgcacaggttttctctggttcttacaggaaccacctactctttcagttttctggcccaggagtggggtaaatcctttagttagtgcatttgaacttgatacctgtgcattcagttctgtgaatactgccctttttggcggggtttcctcatctccccagcctgaactgctcaactctaaacccaaattagtgtcagccgaaaggaggtttcaagatagtcctgtcagtatttgtggtgaccttcagattagacagtcttcatttccagccagtggagtcctggctccagagccatctctgagactcgtactactggatgttttaatatcagatcattacccaccatatgcctcccacaggccaagggaaaacagacaccagaacttgggttgagggcactaccagactgacatggccagtacagaggagaactagggaaggaatgatgttttgcaccttattgaaaagaaaattttaagtgcatacataatagttaagagcttttattgtgacaggagaacttttttccatatgcgtgcatactctctgtaattccagtgtaaaatattgtacttgcactagcttttttaaacaaatattaaaaaatggaagaattcatattctattttctaatcgtggtgtgtctatttgtaggatacactcgagtctgtttattgaattttatggtccctttctttgatggtgcttgcaggttttctaggtagaaattatttcattattataataaaacaatgtttgattcaaaatttgaacaaaattgttttaaataaattgtctgtataccagtacaagtttattgtttcagtatactcgtactaataaaataacagtgccaattgca

SEQ ID NO: 1007 - DNA, 9549 bp, Homo sapiens; identical to SEQ ID NO: 1006
  misc_feature (470)..(470): second gene starts at position 470

SEQ ID NO: 1008 - DNA, 9549 bp, Homo sapiens; identical to SEQ ID NO: 1006
  misc_feature (470)..(470): second gene starts at position 470

SEQ ID NO: 1009 - DNA, 9549 bp, Homo sapiens; identical to SEQ ID NO: 1006
  misc_feature (470)..(470): second gene starts at position 470

SEQ ID NO: 1010 - DNA, 9549 bp, Homo sapiens; identical to SEQ ID NO: 1006
  misc_feature (470)..(470): second gene starts at position 470

SEQ ID NO: 1011 - DNA, 9549 bp, Homo sapiens; identical to SEQ ID NO: 1006
  misc_feature (470)..(470): second gene starts at position 470

SEQ ID NO: 1012 - DNA, 9549 bp, Homo sapiens; identical to SEQ ID NO: 1006
  misc_feature (470)..(470): second gene starts at position 470

SEQ ID NO: 1013 - DNA, 9549 bp, Homo sapiens; identical to SEQ ID NO: 1006
  misc_feature (470)..(470): second gene starts at position 470

SEQ ID NO: 1014 - DNA, 4565 bp, Homo sapiens
  misc_feature (450)..(450): second gene starts at position 450
atgaagaatctgctcactgagaagtgtatatcaagccacaatttccatcaaaaagtgattaagcagagaatggagaagaaggttgattccaggtattttaaggatggtgcagttaagaaaccttattctgcaaagacactgtccaacaagaagtcttctgcatcctttgggatccggagggagttacctagtaccagtcatctagtgcagtatcgtggcacacatacttgtacccgacagggccggttaagagaactgcgcatcagatgcgtggccagaaagttcttatatttatggattcgaatgacttttggaagagtatttccctctaaagccagattttactatgagcagcgattactacggaaggtcttcgaagaatggaaagaggagtggtgggttttccagcacgagtggaaactctgtgttcgagctgactgtcactacaggttacgtttttctctcgtcccagctgtgtggacagtgccacacgccctcctggacaacgacggctcttgcgtgcattttccagtgttgcttttgtcagagaggccagcagagccacggttcttccagaaccagccctgagctgagtgaggagtgcccaggagagatggtgaaaatgacaaagtccaaaactttccaagcgtatctgccgaactgtcaccgaacgtacagctgtatccactgcagagcacacctggccaatcatgacgagctcatctccaagtcctttcaggggagccagggacgcgcctacctcttcaattccgtggtgaacgtgggctgcggccctgcagaggagagggtccttctcaccgggctgcatgcggttgccgacatctactgcgagaactgcaagaccacgctcgggtggaaatacgagcatgcctttgagagcagtcagaaatataaggaaggaaaattcatcattgagcttgctcatatgatcaaagacaatggctgggagtaatgtgcgaactttcccttctcctttgaatgctgttttgtgaaagaaactgtgaatgtaatggaaacgtaggagcatctggtgacagcctttcttgccctctgacctcaaaggctagctgcgcatagctcttgacactctcggccatctctgtgggtaaggtgtccctcggatctgtcctcttcgtgtacacagttgtttctgaaaattttcaatgagctttttctaacttctcaagttctagagaaagaattaaccaactgatgacttacctgcctagttaatatcttcctttcacctttgtcttcaatatagttgggctctgcttttttaaggttcagttgaaaaccaaactggggccgggtgcggtggctcacgcctgtaatcccagcactttgggaggccaagatgggtggatcacctgaggtcaggagttctagatcagcctggccaacatggtgaaaccccatctctactaaaaatacgaaaattagccgggcatggtggcgagtgcctgtaatcttagctactcaggaggctaaggcaggagaatcacttgaacctgggacacggaggttgcagtgagctaagatcatgccatcgcactccagcctgggggacaaaagtgagacatcgtctcaaaaaaaaaaaaaaaagctgggtatggtggcgcatgcctttaatcccagctactcgggaggctgaggcacgagaatcacttgaacccaggaggcggaggttgcagtgagccaagatcgcgccactgcactccagcctggcaatagggcgagactccgtctcaatttaaaacaagagagaaccagactgagtctctgaagaccacagggacagggtctctttagatagcaagtctcaccattcccttttttagagaaaaggtattgtagcccaccctccaccccgctgtttttcttaaatttgcagaacttcaaattggctattcctcttgcaaatgaacccttaaagtacagtgttatttaagaatcttccagaggcagtcaacagacttatacactaagggcatttttggtttttagcttgttcaaaaacagaggccagcacagatgacattttagatacactctaaattgagaatggtgtctagtggaacatgtttatttaagccagtagattccttatctagaaagcaggtgagctagcccttagagaaggctgtcccggggcccgcagaggtgcccttactgaggtgacagcctcacagggtctggtaccaggggttgtgccctcagcagtgacagcagcttaggtgtcaggcagttgctgagtggctggtccatgtctatagagtaacacactggaccgaggaaaagtcagatttcattttctaccctggatgtacttgaagaaaaagaattatttttgcatatgaaagaggccagaacccacaggaaaaacttcaaaacttgacatttgccagaatgtttaaaatttgttcagaaaaggttaaagcaacaagtttagcctttgtgcatgaagacgcctggcctgctagacgcgttgcccgtccctgcgtggtgctgtcccatgtcacttgaactgatagaggggcctgtgcaatctcctaaggcctgtgtttctgccatatattttattataaattacaatccactcatccacctgccctccaccaggagtgggcaccccataagggtttaggccactttgcagaggatggaggtcaaaaaccactcccagataagtttggttttcaacatttagtaacttgtctcagggcagagggcaggcagggggaccgaggggcagcagataggagagcactgagcccggatagttctcagcctggcaagtggctctgaagctgccttcagacaaggctagtctaggggcaagagtgcgagctggctgacaataagaacgtggccacctgcccagcttcacacctcccccgacttcagcccttcctaaacccagacctgcggtccaggcaggcactgggctgtgcccactcgagctcactgcccacacacagcatgcctttgggtgccatctctttgcccaagcctggaagccttggcaggtgggaaatgccgctgccctggtgggcatggcactgagatgcatccactcagcaggagtgacagaggcagaagttcctttaaagcacatcttccacttaggaaaggaaggaaatctttgtactgtcttggaagcctccacatccggctatggccctgcaagctgctttatccctgcgctagtctcccccgagggtttaggctggcccagcacatcctgtcctcctgagctcgcgtgcagccacccagagcgcaggggtcactgcacgctgcagggctcttgctgccatggtctcaagcctgaagaggctccgcccacaagctggcccatgaagttagcaatgcctgtggcttcagtcaattgtcttgagactgtgaagaggctgaaagacaccttcccgggtggaagaaggagttcactgaaaacttatcttaaactgacccttccctttgagtgagtcttcattcctctcccatgtgggaacccagcctccgatgccccggggactaggggaaacagttggaggttcgtgccgtccccagcctgccacgggtgcgaggacagccaagtcctgagtgactcaagatgcttcacttacatggaagaaacttctaaaactctaccgagtggtttttgtatatactaaagttctatttagagcttttctgttttgggcaagttcgctgctccttctatttgggcactttggtttttgtactgtcttttgtgacggcattgattgaacattttttactagtagtcttatgacttttgtatttttttttttttttgtaatttataccaacaacacttttatcactttttttttgttgggcttctgcaaaatacaagctcatttttaaaccaaatgaacagaccatgagctggcttcaggggaagtgctattcacaggaccatatccaccaccctcttaaattcctaaacaatatcatctaggacttctatttaagttatttaaaataaatcttccttgagagccttgggaggtgatgtcagggttataaatggcacagtgcatttgctgtaggaatgtggtttggcattgttttatacacacagtattttttataccttaatgcttattcttgatggcatctgtcagatattagaattgaaaataagaatcttcccaaaatcctttaatttacctgatgccctcatcaggtcgttaaaaattcaaatggttttaatagctaaaaaactacaaattaagctctaaaacaaacaaactacagaaatgtaaaccttcatttgccaaaggtccttggtggcctgtcccctgccctgggagcagatggccctgaagcccttccctcactgtgcaggccaccgggtgaggctggacggtcacccatggtggcttcactgcaaggagcaggactgccgagctcaagcacggggccttcagcttcccctgtcctctggccacaccgccagcccttggtccttatctgtgtgaggtttacaaataaagcttctgatgtcaaatgtttaa

SEQ ID NO: 1015 - DNA, 4565 bp, Homo sapiens; identical to SEQ ID NO: 1014
  misc_feature (450)..(450): second gene starts at position 450

SEQ ID NO: 1016 - DNA, 4116 bp, Homo sapiens
  misc_feature (348)..(348): second gene starts at position 348
caatgaaaacgaggggggcgcggaggaggaggcggcggcgtcggtggcggcggcgacggcggcgcggaggcgaaggcagcggcgggcgcagcgaggagggcgaggccgggggccgagagggcgggagggcgtagtggcggcccgtcggggcggctgaggcgggcagccgaagcagtggctctcggagggggaacaaagagcagcgactaaggcggcagaggagcggcggcggtggcggcgctgcagcagcgggcgggactggtatggtggttccacagggcagaccccgctgcactcacagggaggaggaggcggcagcggcggaggaaggcggcgcaccccgagaggaacatggcaacccgtgtgtgtctcatcccagaaagagaagactttaaccactgtgatgcctgagaatccagtgagtgtgacgtttctccagatacttcatgctgttcacctgtgtcctcgccgcaccactgccgcacacgactcctgaaccatgggggaaaacgaggatgagaagcaggcccaggcggggcaggtttttgagaactttgtccaggcatccacgtgcaaaggtaccctccaggccttcaacattctcacacgacacctggacctagaccctctggaccacagaaacttttattccaagctcaagtccaaggtgaccacctggaaagccaaagccctgtggtacaaattggataagcgtggttcccacaaagagtataagcgagggaagtcgtgcacgaacaccaagtgtctcatagttgggggaggaccctgtggcttgcgcactgccattgaacttgcctacctgggagccaaagtggtcgtggtggagaagagggactccttctcccggaacaacgtgctacacctctggcctttcaccatccatgaccttcgtggcctgggagccaagaagttctatgggaagttctgtgctggctccatcgaccatatcagtattcgccaactacagctcatcctattcaaggtggccctgatgctgggagttgaaatccatgtgaatgtggagttcgtgaaggttctagagcctcctgaagatcaagaaaatcaaaaaattggctggcgggcagaatttctccctacagaccattctctgtcggagtttgagtttgacgtcatcattggtgccgatggccgcaggaacaccctggaagggttcagaagaaaagaattccgtgggaagctggcgattgccatcaccgccaacttcataaacagaaacagcacagcggaagccaaggtggaagagattagtggtgtggctttcatcttcaatcagaaattttttcaggaccttaaagaagaaacaggcatagatcttgagaacattgtttactacaaggactgcacccactattttgtaatgacagccaagaagcagagcctgctcgacaaaggtgtcatcattaacgactacatcgacacagagatgctgctgtgtgcggagaacgtgaaccaagacaacctgctatcctatgcccgggaagctgcagactttgccaccaactaccagctgccatccttagactttgccatgaaccactatgggcagcctgatgtggccatgtttgactttacctgcatgtatgcctcagagaacgcggccctggtgcgggagcggcaggcgcaccagctgctcgtggcccttgtgggtgacagcttgcttgagccattttggcccatgggtacaggctgtgcccgtggcttcctggcagcctttgacacggcatggatggtgaagagctggaaccagggcacccctcccctggagctgctggctgaaagggaaagtctctaccggctgttacctcagacaaccccggagaacatcaacaagaactttgagcagtacacgttggacccagggacacggtacccaaacctcaactcacactgtgtcaggccccatcaggtgaagcatttgtatatcactaaggagctggagcactaccctctcgagagactgggctcggtgaggagatctgtcaacctctccaggaaggagtcagatatccggcccagcaagctcctgacctggtgccagcagcagacagagggctaccagcatgtcaacgtcaccgacctgaccacatcctggcgcagtgggttggccctgtgtgccatcatccaccgcttccggcctgagctcatcaactttgactctttgaatgaagatgatgctgtggagaacaaccagctcgcatttgatgtggccgagcgagagtttgggatccctccagtgaccacgggcaaagagatggcatctgcccaggagcctgacaagctcagcatggtcatgtacctctccaagttctacgagctcttccggggcaccccactgaggcccgtggattcttggcgcaaaaactatggagaaaatgctgacctcagcttggccaaatcatccatttctaataactatctcaacctcacatttccaaggaagaggactccacgggtggatggtcaaaccggagagaatgacatgaacaaacggagacggaagggcttcaccaacctggacgagccttcaaacttttccagccgtagcttgggctccaatcaagagtgtgggagcagtaaggaaggtggaaatcagaacaaagtcaagtccatggcgaatcagctgctggccaagtttgaggagagcactcggaacccctcactcatgaagcaggaacgccgtgtctcagggataggtaagccggtcctgtgctcttcctccggccctcctgttcactcttgctgccccaagccggaggaggccacacccagcccatcacctcctctgaaaaggcagttcccctctgtggtcgtgacggggcacgtgctcagagagctcaagcaagtgtctgctggcagtgagtgcctgagcagaccttggagagccagagccaagtctgacctacagctgggtgggacagaaaatttcgctaccctgccttctacccgcccgagggcgcaggctctttccggggtgctgtggcggctgcagcaagtggaggaaaagattctccagaagagggctcagaacttggccaacagggaatttcacacaaagaacattaaggagaaggcggctcaccttgcctccatgtttggacacggggatttcccgcagaataaactactctctaaaggcctgtctcatactcatcctccatctcctccctctcgccttccgtctcctgatccagctgcttcttcctctccatcaactgttgactctgcttctcctgccagaaaggaaaagaagtcaccttcagggttccattttcatcccagccatttgagaacagtgcatcctcagctgacggtagggaaagtgtccagcggaataggggctgcagctgaagtcctggtcaatctgtacatgaatgatcacagacctaaggcccaggccacctctccagacctggaatctatgcgaaagtcatttccccttaacctgggaggcagcgacacgtgttacttctgtaagaaacgtgtgtacgtgatggaacggctgagcgccgagggccacttcttccaccgggagtgtttccgctgcagcatctgtgccaccaccttgcgcctggccgcctacacctttgactgcgatgaaggcaaattttactgcaagcctcacttcattcactgtaaaaccaatagcaaacaacggaagagacgggcagagttgaagcaacaaagagaggaggaggcaacatggcaagagcaggaagcccctcggagagacactcccaccgaaagttcttgcgcagtggccgccattggcaccctggaaggcagccccccagttcatttcagccttccagtgctacacccacttcttggctgacacacttctgctctaagagtctccctccctttatagaatgtcaaccaaagagtgccctcctcccctctcagcctcctctttagctagcctccccatctcatcacaacgcatgtctgtgacctttggtaatcatttacagtgccacacggaaccctgtattttgcacacagcaaaacaaacaatgtttagctttatttatggtatttgatgctgtaaatggaaataaatattgttctttataa

SEQ ID NO: 1017 - DNA, 4041 bp, Homo sapiens
  misc_feature (348)..(348): second gene starts at position 348
caatgaaaacgaggggggcgcggaggaggaggcggcggcgtcggtggcggcggcgacggcggcgcggaggcgaaggcagcggcgggcgcagcgaggagggcgaggccgggggccgagagggcgggagggcgtagtggcggcccgtcggggcggctgaggcgggcagccgaagcagtggctctcggagggggaacaaagagcagcgactaaggcggcagaggagcggcggcggtggcggcgctgcagcagcgggcgggactggtatggtggttccacagggcagaccccgctgcactcacagggaggaggaggcggcagcggcggaggaaggcggcgcaccccgagaggtgtgacgtttctccagatacttcatgctgttcacctgtgtcctcgccgcaccactgccgcacacgactcctgaaccatgggggaaaacgaggatgagaagcaggcccaggcggggcaggtttttgagaactttgtccaggcatccacgtgcaaaggtaccctccaggccttcaacattctcacacgacacctggacctagaccctctggaccacagaaacttttattccaagctcaagtccaaggtgaccacctggaaagccaaagccctgtggtacaaattggataagcgtggttcccacaaagagtataagcgagggaagtcgtgcacgaacaccaagtgtctcatagttgggggaggaccctgtggcttgcgcactgccattgaacttgcctacctgggagccaaagtggtcgtggtggagaagagggactccttctcccggaacaacgtgctacacctctggcctttcaccatccatgaccttcgtggcctgggagccaagaagttctatgggaagttctgtgctggctccatcgaccatatcagtattcgccaactacagctcatcctattcaaggtggccctgatgctgggagttgaaatccatgtgaatgtggagttcgtgaaggttctagagcctcctgaagatcaagaaaatcaaaaaattggctggcgggcagaatttctccctacagaccattctctgtcggagtttgagtttgacgtcatcattggtgccgatggccgcaggaacaccctggaagggttcagaagaaaagaattccgtgggaagctggcgattgccatcaccgccaacttcataaacagaaacagcacagcggaagccaaggtggaagagattagtggtgtggctttcatcttcaatcagaaattttttcaggaccttaaagaagaaacaggcatagatcttgagaacattgtttactacaaggactgcacccactattttgtaatgacagccaagaagcagagcctgctcgacaaaggtgtcatcattaacgactacatcgacacagagatgctgctgtgtgcggagaacgtgaaccaagacaacctgctatcctatgcccgggaagctgcagactttgccaccaactaccagctgccatccttagactttgccatgaaccactatgggcagcctgatgtggccatgtttgactttacctgcatgtatgcctcagagaacgcggccctggtgcgggagcggcaggcgcaccagctgctcgtggcccttgtgggtgacagcttgcttgagccattttggcccatgggtacaggctgtgcccgtggcttcctggcagcctttgacacggcatggatggtgaagagctggaaccagggcacccctcccctggagctgctggctgaaagggaaagtctctaccggctgttacctcagacaaccccggagaacatcaacaagaactttgagcagtacacgttggacccagggacacggtacccaaacctcaactcacactgtgtcaggccccatcaggtgaagcatttgtatatcactaaggagctggagcactaccctctcgagagactgggctcggtgaggagatctgtcaacctctccaggaaggagtcagatatccggcccagcaagctcctgacctggtgccagcagcagacagagggctaccagcatgtcaacgtcaccgacctgaccacatcctggcgcagtgggttggccctgtgtgccatcatccaccgcttccggcctgagctcatcaactttgactctttgaatgaagatgatgctgtggagaacaaccagctcgcatttgatgtggccgagcgagagtttgggatccctccagtgaccacgggcaaagagatggcatctgcccaggagcctgacaagctcagcatggtcatgtacctctccaagttctacgagctcttccggggcaccccactgaggcccgtggattcttggcgcaaaaactatggagaaaatgctgacctcagcttggccaaatcatccatttctaataactatctcaacctcacatttccaaggaagaggactccacgggtggatggtcaaaccggagagaatgacatgaacaaacggagacggaagggcttcaccaacctggacgagccttcaaacttttccagccgtagcttgggctccaatcaagagtgtgggagcagtaaggaaggtggaaatcagaacaaagtcaagtccatggcgaatcagctgctggccaagtttgaggagagcactcggaacccctcactcatgaagcaggaacgccgtgtctcagggataggtaagccggtcctgtgctcttcctccggccctcctgttcactcttgctgccccaagccggaggaggccacacccagcccatcacctcctctgaaaaggcagttcccctctgtggtcgtgacggggcacgtgctcagagagctcaagcaagtgtctgctggcagtgagtgcctgagcagaccttggagagccagagccaagtctgacctacagctgggtgggacagaaaatttcgctaccctgccttctacccgcccgagggcgcaggctctttccggggtgctgtggcggctgcagcaagtggaggaaaagattctccagaagagggctcagaacttggccaacagggaatttcacacaaagaacattaaggagaaggcggctcaccttgcctccatgtttggacacggggatttcccgcagaataaactactctctaaaggcctgtctcatactcatcctccatctcctccctctcgccttccgtctcctgatccagctgcttcttcctctccatcaactgttgactctgcttctcctgccagaaaggaaaagaagtcaccttcagggttccattttcatcccagccatttgagaacagtgcatcctcagctgacggtagggaaagtgtccagcggaataggggctgcagctgaagtcctggtcaatctgtacatgaatgatcacagacctaaggcccaggccacctctccagacctggaatctatgcgaaagtcatttccccttaacctgggaggcagcgacacgtgttacttctgtaagaaacgtgtgtacgtgatggaacggctgagcgccgagggccacttcttccaccgggagtgtttccgctgcagcatctgtgccaccaccttgcgcctggccgcctacacctttgactgcgatgaaggcaaattttactgcaagcctcacttcattcactgtaaaaccaatagcaaacaacggaagagacgggcagagttgaagcaacaaagagaggaggaggcaacatggcaagagcaggaagcccctcggagagacactcccaccgaaagttcttgcgcagtggccgccattggcaccctggaaggcagccccccagttcatttcagccttccagtgctacacccacttcttggctgacacacttctgctctaagagtctccctccctttatagaatgtcaaccaaagagtgccctcctcccctctcagcctcctctttagctagcctccccatctcatcacaacgcatgtctgtgacctttggtaatcatttacagtgccacacggaaccctgtattttgcacacagcaaaacaaacaatgtttagctttatttatggtatttgatgctgtaaatggaaataaatattgttctttataa

SEQ ID NO: 1018 - DNA, 10189 bp, Homo sapiens
  misc_feature (699)..(699): second gene starts at position 699
atgaccacctccatccgccagttcacctcctccagctccatcaagggctcctccggcctggggggcggctcgtcccgcacctcctgccggctgtctggcggcctgggtgccggctcctgcaggctgggatctgctggcggcctgggcagcaccctcgggggtagcagctactccagctgctacagctttggctctggtggtggctatggcagcagctttgggggtgttgatgggctgctggctggaggtgagaaggccaccatgcagaacctcaatgaccgcctggcctcctacctggacaaggtgcgtgccctggaggaggccaacactgagctggaggtgaagatccgtgactggtaccagaggcaggccccggggcccgcccgtgactacagccagtactacaggacaattgaggagctgcagaacaagatcctcacagccaccgtggacaatgccaacatcctgctacagattgacaatgcccgtctggctgctgatgacttccgcaccaagtttgagacagagcaggccctgcgcctgagtgtggaggccgacatcaatggcctgcgcagggtgctggatgagctgaccctggccagagccgacctggagatgcagattgagaacctcaaggaggagctggcctacctgaagaagaaccacgaggaggagatgaacgccctgcgaggccaggtacattgattcaccacccatcacagcccggaacactggcatcatctgtaccattggcccagcttcccgatcagtggagacgttgaaggagatgattaagtctggaatgaatgtggctcgtctgaacttctctcatggaactcatgagtaccatgcggagaccatcaagaatgtgcgcacagccacggaaagctttgcttctgaccccatcctctaccggcccgttgctgtggctctagacactaaaggacctgagatccgaactgggctcatcaagggcagcggcactgcagaggtggagctgaagaagggagccactctcaaaatcacgctggataacgcctacatggaaaagtgtgacgagaacatcctgtggctggactacaagaacatctgcaaggtggtggaagtgggcagcaagatctacgtggatgatgggcttatttctctccaggtgaagcagaaaggtgccgacttcctggtgacggaggtggaaaatggtggctccttgggcagcaagaagggtgtgaaccttcctggggctgctgtggacttgcctgctgtgtcggagaaggacatccaggatctgaagtttggggtcgagcaggatgttgatatggtgtttgcgtcattcatccgcaaggcatctgatgtccatgaagttaggaaggtcctgggagagaagggaaagaacatcaagattatcagcaaaatcgagaatcatgagggggttcggaggtttgatgaaatcctggaggccagtgatgggatcatggtggctcgtggtgatctaggcattgagattcctgcagagaaggtcttccttgctcagaagatgatgattggacggtgcaaccgagctgggaagcctgtcatctgtgctactcagatgctggagagcatgatcaagaagccccgccccactcgggctgaaggcagtgatgtggccaatgcagtcctggatggagccgactgcatcatgctgtctggagaaacagccaaaggggactatcctctggaggctgtgcgcatgcagcacctgattgcccgtgaggcagaggctgccatctaccacttgcaattatttgaggaactccgccgcctggcgcccattaccagcgaccccacagaagccaccgccgtgggtgccgtggaggcctccttcaagtgctgcagtggggccataatcgtcctcaccaagtctggcaggtctgctcaccaggtggccagataccgcccacgtgcccccatcattgctgtgacccggaatccccagacagctcgtcaggcccacctgtaccgtggcatcttccctgtgctgtgcaaggacccagtccaggaggcctgggctgaggacgtggacctccgggtgaactttgccatgaatgttggcaaggcccgaggcttcttcaagaagggagatgtggtcattgtgctgaccggatggcgccctggctccggcttcaccaacaccatgcgtgttgttcctgtgccgtgatggaccccagagcccctcctccagcccctgtcccacccccttcccccagcccatccattaggccagcaacgcttgtagaactcactctgggctgtaacgtggcactggtaggttgggacaccagggaagaagatcaacgcctcactgaaacatggctgtgtttgcagcctgctctagtgggacagcccagagcctggctgcccatcatgtggccccacccaatcaagggaagaaggaggaatgctggactggaggcccctggagccagatggcaagagggtgacagcttcctttcctgtgtgtactctgtccagttcctttagaaaaaatggatgcccagaggactcccaaccctggcttggggtcaagaaacagccagcaagagttaggggccttagggcactgggctgttgttccattgaagccgactctggccctggcccttacttgcttctctagctctctaggcctctccagtttgcacctgtccccaccctccactcagctgtcctgcagcaaacactccaccctccaccttccattttcccccactactgcagcacctccaggcctgttgctatagagcctacctgtatgtcaataaacaacagctgaagcacccgccgcgcttcctcctgaaggtgactgcgcccgcggggacgcagggggcggggcccgggtcgcccggagccgggattgggcagagggcggggcggcggagggattgcggcggcccgcagcgggataaccttgaggctgaggcagtggctccttgcacagcagctgcacgcgccgtggctccggatctcttcgtctttgcagcgtagcccgagtcggtcagcgccggaggacctcagcagccatgtcgaagccccatagtgaagccgggactgccttcattcagacccagcagctgcacgcagccatggctgacacattcctggagcacatgtgccgcctggacattgattcaccacccatcacagcccggaacactggcatcatctgtaccattggcccagcttcccgatcagtggagacgttgaaggagatgattaagtctggaatgaatgtggctcgtctgaacttctctcatggaactcatgagtaccatgcggagaccatcaagaatgtgcgcacagccacggaaagctttgcttctgaccccatcctctaccggcccgttgctgtggctctagacactaaaggacctgagatccgaactgggctcatcaagggcagcggcactgcagaggtggagctgaagaagggagccactctcaaaatcacgctggataacgcctacatggaaaagtgtgacgagaacatcctgtggctggactacaagaacatctgcaaggtggtggaagtgggcagcaagatctacgtggatgatgggcttatttctctccaggtgaagcagaaaggtgccgacttcctggtgacggaggtggaaaatggtggctccttgggcagcaagaagggtgtgaaccttcctggggctgctgtggacttgcctgctgtgtcggagaaggacatccaggatctgaagtttggggtcgagcaggatgttgatatggtgtttgcgtcattcatccgcaaggcatctgatgtccatgaagttaggaaggtcctgggagagaagggaaagaacatcaagattatcagcaaaatcgagaatcatgagggggttcggaggtttgatgaaatcctggaggccagtgatgggatcatggtggctcgtggtgatctaggcattgagattcctgcagagaaggtcttccttgctcagaagatgatgattggacggtgcaaccgagctgggaagcctgtcatctgtgctactcagatgctggagagcatgatcaagaagccccgccccactcgggctgaaggcagtgatgtggccaatgcagtcctggatggagccgactgcatcatgctgtctggagaaacagccaaaggggactatcctctggaggctgtgcgcatgcagcacctgattgcccgtgaggcagaggctgccatctaccacttgcaattatttgaggaactccgccgcctggcgcccattaccagcgaccccacagaagccaccgccgtgggtgccgtggaggcctccttcaagtgctgcagtggggccataatcgtcctcaccaagtctggcaggtctgctcaccaggtggccagataccgcccacgtgcccccatcattgctgtgacccggaatccccagacagctcgtcaggcccacctgtaccgtggcatcttccctgtgctgtgcaaggacccagtccaggaggcctgggctgaggacgtggacctccgggtgaactttgccatgaatgttggcaaggcccgaggcttcttcaagaagggagatgtggtcattgtgctgaccggatggcgccctggctccggcttcaccaacaccatgcgtgttgttcctgtgccgtgatggaccccagagcccctcctccagcccctgtcccacccccttcccccagcccatccattaggccagcaacgcttgtagaactcactctgggctgtaacgtggcactggtaggttgggacaccagggaagaagatcaacgcctcactgaaacatggctgtgtttgcagcctgctctagtgggacagcccagagcctggctgcccatcatgtggccccacccaatcaagggaagaaggaggaatgctggactggaggcccctggagccagatggcaagagggtgacagcttcctttcctgtgtgtactctgtccagttcctttagaaaaaatggatgcccagaggactcccaaccctggcttggggtcaagaaacagccagcaagagttaggggccttagggcactgggctgttgttccattgaagccgactctggccctggcccttacttgcttctctagctctctaggcctctccagtttgcacctgtccccaccctccactcagctgtcctgcagcaaacactccaccctccaccttccattttcccccactactgcagcacctccaggcctgttgctatagagcctacctgtatgtcaataaacaacagctgaagcacccgccgcgcttcctcctgaaggtgactgcgcccgcggggacgcagggggcggggcccgggtcgcccggagccgggattgggcagagggcggggcggcggagggattgcggcggcccgcagcgggataaccttgaggctgaggcagtggctccttgcacagcagctgcacgcgccgtggctccggatctcttcgtctttgcagcgtagcccgagtcggtcagcgccggaggacctcagcagccatgtcgaagccccatagtgaagccgggactgccttcattcagacccagcagctgcacgcagccatggctgacacattcctggagcacatgtgccgcctggacattgattcaccacccatcacagcccggaacactggcatcatctgtaccattggcccagcttcccgatcagtggagacgttgaaggagatgattaagtctggaatgaatgtggctcgtctgaacttctctcatggaactcatgagtaccatgcggagaccatcaagaatgtgcgcacagccacggaaagctttgcttctgaccccatcctctaccggcccgttgctgtggctctagacactaaaggacctgagatccgaactgggctcatcaagggcagcggcactgcagaggtggagctgaagaagggagccactctcaaaatcacgctggataacgcctacatggaaaagtgtgacgagaacatcctgtggctggactacaagaacatctgcaaggtggtggaagtgggcagcaagatctacgtggatgatgggcttatttctctccaggtgaagcagaaaggtgccgacttcctggtgacggaggtggaaaatggtggctccttgggcagcaagaagggtgtgaaccttcctggggctgctgtggacttgcctgctgtgtcggagaaggacatccaggatctgaagtttggggtcgagcaggatgttgatatggtgtttgcgtcattcatccgcaaggcatctgatgtccatgaagttaggaaggtcctgggagagaagggaaagaacatcaagattatcagcaaaatcgagaatcatgagggggttcggaggtttgatgaaatcctggaggccagtgatgggatcatggtggctcgtggtgatctaggcattgagattcctgcagagaaggtcttccttgctcagaagatgatgattggacggtgcaaccgagctgggaagcctgtcatctgtgctactcagatgctggagagcatgatcaagaagccccgccccactcgggctgaaggcagtgatgtggccaatgcagtcctggatggagccgactgcatcatgctgtctggagaaacagccaaaggggactatcctctggaggctgtgcgcatgcagcacctgattgcccgtgaggcagaggctgccatctaccacttgcaattatttgaggaactccgccgcctggcgcccattaccagcgaccccacagaagccaccgccgtgggtgccgtggaggcctccttcaagtgctgcagtggggccataatcgtcctcaccaagtctggcaggtctgctcaccaggtggccagataccgcccacgtgcccccatcattgctgtgacccggaatccccagacagctcgtcaggcccacctgtaccgtggcatcttccctgtgctgtgcaaggacccagtccaggaggcctgggctgaggacgtggacctccgggtgaactttgccatgaatgttggcaaggcccgaggcttcttcaagaagggagatgtggtcattgtgctgaccggatggcgccctggctccggcttcaccaacaccatgcgtgttgttcctgtgccgtgatggaccccagagcccctcctccagcccctgtcccacccccttcccccagcccatccattaggccagcaacgcttgtagaactcactctgggctgtaacgtggcactggtaggttgggacaccagggaagaagatcaacgcctcactgaaacatggctgtgtttgcagcctgctctagtgggacagcccagagcctggctgcccatcatgtggccccacccaatcaagggaagaaggaggaatgctggactggaggcccctggagccagatggcaagagggtgacagcttcctttcctgtgtgtactctgtccagttcctttagaaaaaatggatgcccagaggactcccaaccctggcttggggtcaagaaacagccagcaagagttaggggccttagggcactgggctgttgttccattgaagccgactctggccctggcccttacttgcttctctagctctctaggcctctccagtttgcacctgtccccaccctccactcagctgtcctgcagcaaacactccaccctccaccttccattttcccccactactgcagcacctccaggcctgttgctatagagcctacctgtatgtcaataaacaacagctgaagcacccgccgcgcttcctcctgaaggtgactgcgcccgcggggacgcagggggcggggcccgggtcgcccggagccgggattgggcagagggcggggcggcggagggattgcggcggcccgcagcgggataaccttgaggctgaggcagtggctccttgcacagcagctgcacgcgccgtggctccggatctcttcgtctttgcagcgtagcccgagtcggtcagcgccggaggacctcagcagccatgtcgaagccccatagtgaagccgggactgccttcattcagacccagcagctgcacgcagccatggctgacacattcctggagcacatgtgccgcctggacattgattcaccacccatcacagcccggaacactggcatcatctgtaccattggcccagcttcccgatcagtggagacgttgaaggagatgattaagtctggaatgaatgtggctcgtctgaacttctctcatggaactcatgagtaccatgcggagaccatcaagaatgtgcgcacagccacggaaagctttgcttctgaccccatcctctaccggcccgttgctgtggctctagacactaaaggacctgagatccgaactgggctcatcaagggcagcggcactgcagaggtggagctgaagaagggagccactctcaaaatcacgctggataacgcctacatggaaaagtgtgacgagaacatcctgtggctggactacaagaacatctgcaaggtggtggaagtgggcagcaagatctacgtggatgatgggcttatttctctccaggtgaagcagaaaggtgccgacttcctggtgacggaggtggaaaatggtggctccttgggcagcaagaagggtgtgaaccttcctggggctgctgtggacttgcctgctgtgtcggagaaggacatccaggatctgaagtttggggtcgagcaggatgttgatatggtgtttgcgtcattcatccgcaaggcatctgatgtccatgaagttaggaaggtcctgggagagaagggaaagaacatcaagattatcagcaaaatcgagaatcatgagggggttcggaggtttgatgaaatcctggaggccagtgatgggatcatggtggctcgtggtgatctaggcattgagattcctgcagagaaggtcttccttgctcagaagatgatgattggacggtgcaaccgagctgggaagcctgtcatctgtgctactcagatgctggagagcatgatcaagaagccccgccccactcgggctgaaggcagtgatgtggccaatgcagtcctggatggagccgactgcatcatgctgtctggagaaacagccaaaggggactatcctctggaggctgtgcgcatgcagcacctgattgcccgtgaggcagaggctgccatctaccacttgcaattatttgaggaactccgccgcctggcgcccattaccagcgaccccacagaagccaccgccgtgggtgccgtggaggcctccttcaagtgctgcagtggggccataatcgtcctcaccaagtctggcaggtctgctcaccaggtggccagataccgcccacgtgcccccatcattgctgtgacccggaatccccagacagctcgtcaggcccacctgtaccgtggcatcttccctgtgctgtgcaaggacccagtccaggaggcctgggctgaggacgtggacctccgggtgaactttgccatgaatgttggcaaggcccgaggcttcttcaagaagggagatgtggtcattgtgctgaccggatggcgccctggctccggcttcaccaacaccatgcgtgttgttcctgtgccgtgatggaccccagagcccctcctccagcccctgtcccacccccttcccccagcccatccattaggccagcaacgcttgtagaactcactctgggctgtaacgtggcactggtaggttgggacaccagggaagaagatcaacgcctcactgaaacatggctgtgtttgcagcctgctctagtgggacagcccagagcctggctgcccatcatgtggccccacccaatcaagggaagaaggaggaatgctggactggaggcccctggagccagatggcaagagggtgacagcttcctttcctgtgtgtactctgtccagttcctttagaaaaaatggatgcccagaggactcccaaccctggcttggggtcaagaaacagccagcaagagttaggggccttagggcactgggctgttgttccattgaagccgactctggccctggcccttacttgcttctctagctctctaggcctctccagtttgcacctgtccccaccctccactcagctgtcctgcagcaaacactccaccctccaccttccattttcccccactactgcagcacctccaggcctgttgctatagagcctacctgtatgtcaataaacaacagctgaagcacc

SEQ ID NO: 1019 - DNA, 10189 bp, Homo sapiens
  misc_feature (699)..(699): second gene starts at position 699
atgaccacctccatccgccagttcacctcctccagctccatcaagggctcctccggcctggggggcggctcgtcccgcacctcctgccggctgtctggcggcctgggtgccggctcctgcaggctgggatctgctggcggcctgggcagcaccctcgggggtagcagctactccagctgctacagctttggctctggtggtggctatggcagcagctttgggggtgttgatgggctgctggctggaggtgagaaggccaccatgcagaacctcaatgaccgcctggcctcctacctggacaaggtgcgtgccctggaggaggccaacactgagctggaggtgaagatccgtgactggtaccagaggcaggccccggggcccgcccgtgactacagccagtactacaggacaattgaggagctgcagaacaagatcctcacagccaccgtggacaatgccaacatcctgctacagattgacaatgcccgtctggctgctgatgacttccgcaccaagtttgagacagagcaggccctgcgcctgagtgtggaggccgacatcaatggcctgcgcagggtgctggatgagctgaccctggccagagccgacctggagatgcagattgagaacctcaaggaggagctggcctacctgaagaagaaccacgaggaggagatgaacgccctgcgaggccaggtacattgattcaccacccatcacagcccggaacactggcatcatctgtaccattggcccagcttcccgatcagtggagacgttgaaggagatgattaagtctggaatgaatgtggctcgtctgaacttctctcatggaactcatgagtaccatgcggagaccatcaagaatgtgcgcacagccacggaaagctttgcttctgaccccatcctctaccggcccgttgctgtggctctagacactaaaggacctgagatccgaactgggctcatcaagggcagcggcactgcagaggtggagctgaagaagggagccactctcaaaatcacgctggataacgcctacatggaaaagtgtgacgagaacatcctgtggctggactacaagaacatctgcaaggtggtggaagtgggcagcaagatctacgtggatgatgggcttatttctctccaggtgaagcagaaaggtgccgacttcctggtgacggaggtggaaaatggtggctccttgggcagcaagaagggtgtgaaccttcctggggctgctgtggacttgcctgctgtgtcggagaaggacatccaggatctgaagtttggggtcgagcaggatgttgatatggtgtttgcgtcattcatccgcaaggcatctgatgtccatgaagttaggaaggtcctgggagagaagggaaagaacatcaagattatcagcaaaatcgagaatcatgagggggttcggaggtttgatgaaatcctggaggccagtgatgggatcatggtggctcgtggtgatctaggcattgagattcctgcagagaaggtcttccttgctcagaagatgatgattggacggtgcaaccgagctgggaagcctgtcatctgtgctactcagatgctggagagcatgatcaagaagccccgccccactcgggctgaaggcagtgatgtggccaatgcagtcctggatggagccgactgcatcatgctgtctggagaaacagccaaaggggactatcctctggaggctgtgcgcatgcagcacctgatagctcgtgaggctgaggcagccatgttccaccgcaagctgtttgaagaacttgtgcgagcctcaagtcactccacagacctcatggaagccatggccatgggcagcgtggaggcttcttataagtgtttagcagcagctttgatagttctgacggagtctggcaggtctgctcaccaggtggccagataccgcccacgtgcccccatcattgctgtgacccggaatccccagacagctcgtcaggcccacctgtaccgtggcatcttccctgtgctgtgcaaggacccagtccaggaggcctgggctgaggacgtggacctccgggtgaactttgccatgaatgttggcaaggcccgaggcttcttcaagaagggagatgtggtcattgtgctgaccggatggcgccctggctccggcttcaccaacaccatgcgtgttgttcctgtgccgtgatggaccccagagcccctcctccagcccctgtcccacccccttcccccagcccatccattaggccagcaacgcttgtagaactcactctgggctgtaacgtggcactggtaggttgggacaccagggaagaagatcaacgcctcactgaaacatggctgtgtttgcagcctgctctagtgggacagcccagagcctggctgcccatcatgtggccccacccaatcaagggaagaaggaggaatgctggactggaggcccctggagccagatggcaagagggtgacagcttcctttcctgtgtgtactctgtccagttcctttagaaaaaatggatgcccagaggactcccaaccctggcttggggtcaagaaacagccagcaagagttaggggccttagggcactgggctgttgttccattgaagccgactctggccctggcccttacttgcttctctagctctctaggcctctccagtttgcacctgtccccaccctccactcagctgtcctgcagcaaacactccaccctccaccttccattttcccccactactgcagcacctccaggcctgttgctatagagcctacctgtatgtcaataaacaacagctgaagcacccgccgcgcttcctcctgaaggtgactgcgcccgcggggacgcagggggcggggcccgggtcgcccggagccgggattgggcagagggcggggcggcggagggattgcggcggcccgcagcgggataaccttgaggctgaggcagtggctccttgcacagcagctgcacgcgccgtggctccggatctcttcgtctttgcagcgtagcccgagtcggtcagcgccggaggacctcagcagccatgtcgaagccccatagtgaagccgggactgccttcattcagacccagcagctgcacgcagccatggctgacacattcctggagcacatgtgccgcctggacattgattcaccacccatcacagcccggaacactggcatcatctgtaccattggcccagcttcccgatcagtggagacgttgaaggagatgattaagtctggaatgaatgtggctcgtctgaacttctctcatggaactcatgagtaccatgcggagaccatcaagaatgtgcgcacagccacggaaagctttgcttctgaccccatcctctaccggcccgttgctgtggctctagacactaaaggacctgagatccgaactgggctcatcaagggcagcggcactgcagaggtggagctgaagaagggagccactctcaaaatcacgctggataacgcctacatggaaaagtgtgacgagaacatcctgtggctggactacaagaacatctgcaaggtggtggaagtgggcagcaagatctacgtggatgatgggcttatttctctccaggtgaagcagaaaggtgccgacttcctggtgacggaggtggaaaatggtggctccttgggcagcaagaagggtgtgaaccttcctggggctgctgtggacttgcctgctgtgtcggagaaggacatccaggatctgaagtttggggtcgagcaggatgttgatatggtgtttgcgtcattcatccgcaaggcatctgatgtccatgaagttaggaaggtcctgggagagaagggaaagaacatcaagattatcagcaaaatcgagaatcatgagggggttcggaggtttgatgaaatcctggaggccagtgatgggatcatggtggctcgtggtgatctaggcattgagattcctgcagagaaggtcttccttgctcagaagatgatgattggacggtgcaaccgagctgggaagcctgtcatctgtgctactcagatgctggagagcatgatcaagaagccccgccccactcgggctgaaggcagtgatgtggccaatgcagtcctggatggagccgactgcatcatgctgtctggagaaacagccaaaggggactatcctctggaggctgtgcgcatgcagcacctgatagctcgtgaggctgaggcagccatgttccaccgcaagctgtttgaagaacttgtgcgagcctcaagtcactccacagacctcatggaagccatggccatgggcagcgtggaggcttcttataagtgtttagcagcagctttgatagttctgacggagtctggcaggtctgctcaccaggtggccagataccgcccacgtgcccccatcattgctgtgacccggaatccccagacagctcgtcaggcccacctgtaccgtggcatcttccctgtgctgtgcaaggacccagtccaggaggcctgggctgaggacgtggacctccgggtgaactttgccatgaatgttggcaaggcccgaggcttcttcaagaagggagatgtggtcattgtgctgaccggatggcgccctggctccggcttcaccaacaccatgcgtgttgttcctgtgccgtgatggaccccagagcccctcctccagcccctgtcccacccccttcccccagcccatccattaggccagcaacgcttgtagaactcactctgggctgtaacgtggcactggtaggttgggacaccagggaagaagatcaacgcctcactgaaacatggctgtgtttgcagcctgctctagtgggacagcccagagcctggctgcccatcatgtggccccacccaatcaagggaagaaggaggaatgctggactggaggcccctggagccagatggcaagagggtgacagcttcctttcctgtgtgtactctgtccagttcctttagaaaaaatggatgcccagaggactcccaaccctggcttggggtcaagaaacagccagcaagagttaggggccttagggcactgggctgttgttccattgaagccgactctggccctggcccttacttgcttctctagctctctaggcctctccagtttgcacctgtccccaccctccactcagctgtcctgcagcaaacactccaccctccaccttccattttcccccactactgcagcacctccaggcctgttgctatagagcctacctgtatgtcaataaacaacagctgaagcacccgccgcgcttcctcctgaaggtgactgcgcccgcggggacgcagggggcggggcccgggtcgcccggagccgggattgggcagagggcggggcggcggagggattgcggcggcccgcagcgggataaccttgaggctgaggcagtggctccttgcacagcagctgcacgcgccgtggctccggatctcttcgtctttgcagcgtagcccgagtcggtcagcgccggaggacctcagcagccatgtcgaagccccatagtgaagccgggactgccttcattcagacccagcagctgcacgcagccatggctgacacattcctggagcacatgtgccgcctggacattgattcaccacccatcacagcccggaacactggcatcatctgtaccattggcccagcttcccgatcagtggagacgttgaaggagatgattaagtctggaatgaatgtggctcgtctgaacttctctcatggaactcatgagtaccatgcggagaccatcaagaatgtgcgcacagccacggaaagctttgcttctgaccccatcctctaccggcccgttgctgtggctctagacactaaaggacctgagatccgaactgggctcatcaagggcagcggcactgcagaggtggagctgaagaagggagccactctcaaaatcacgctggataacgcctacatggaaaagtgtgacgagaacatcctgtggctggactacaagaacatctgcaaggtggtggaagtgggcagcaagatctacgtggatgatgggcttatttctctccaggtgaagcagaaaggtgccgacttcctggtgacggaggtggaaaatggtggctccttgggcagcaagaagggtgtgaaccttcctggggctgctgtggacttgcctgctgtgtcggagaaggacatccaggatctgaagtttggggtcgagcaggatgttgatatggtgtttgcgtcattcatccgcaaggcatctgatgtccatgaagttaggaaggtcctgggagagaagggaaagaacatcaagattatcagcaaaatcgagaatcatgagggggttcggaggtttgatgaaatcctggaggccagtgatgggatcatggtggctcgtggtgatctaggcattgagattcctgcagagaaggtcttccttgctcagaagatgatgattggacggtgcaaccgagctgggaagcctgtcatctgtgctactcagatgctggagagcatgatcaagaagccccgccccactcgggctgaaggcagtgatgtggccaatgcagtcctggatggagccgactgcatcatgctgtctggagaaacagccaaaggggactatcctctggaggctgtgcgcatgcagcacctgatagctcgtgaggctgaggcagccatgttccaccgcaagctgtttgaagaacttgtgcgagcctcaagtcactccacagacctcatggaagccatggccatgggcagcgtggaggcttcttataagtgtttagcagcagctttgatagttctgacggagtctggcaggtctgctcaccaggtggccagataccgcccacgtgcccccatcattgctgtgacccggaatccccagacagctcgtcaggcccacctgtaccgtggcatcttccctgtgctgtgcaaggacccagtccaggaggcctgggctgaggacgtggacctccgggtgaactttgccatgaatgttggcaaggcccgaggcttcttcaagaagggagatgtggtcattgtgctgaccggatggcgccctggctccggcttcaccaacaccatgcgtgttgttcctgtgccgtgatggaccccagagcccctcctccagcccctgtcccacccccttcccccagcccatccattaggccagcaacgcttgtagaactcactctgggctgtaacgtggcactggtaggttgggacaccagggaagaagatcaacgcctcactgaaacatggctgtgtttgcagcctgctctagtgggacagcccagagcctggctgcccatcatgtggccccacccaatcaagggaagaaggaggaatgctggactggaggcccctggagccagatggcaagagggtgacagcttcctttcctgtgtgtactctgtccagttcctttagaaaaaatggatgcccagaggactcccaaccctggcttggggtcaagaaacagccagcaagagttaggggccttagggcactgggctgttgttccattgaagccgactctggccctggcccttacttgcttctctagctctctaggcctctccagtttgcacctgtccccaccctccactcagctgtcctgcagcaaacactccaccctccaccttccattttcccccactactgcagcacctccaggcctgttgctatagagcctacctgtatgtcaataaacaacagctgaagcacccgccgcgcttcctcctgaaggtgactgcgcccgcggggacgcagggggcggggcccgggtcgcccggagccgggattgggcagagggcggggcggcggagggattgcggcggcccgcagcgggataaccttgaggctgaggcagtggctccttgcacagcagctgcacgcgccgtggctccggatctcttcgtctttgcagcgtagcccgagtcggtcagcgccggaggacctcagcagccatgtcgaagccccatagtgaagccgggactgccttcattcagacccagcagctgcacgcagccatggctgacacattcctggagcacatgtgccgcctggacattgattcaccacccatcacagcccggaacactggcatcatctgtaccattggcccagcttcccgatcagtggagacgttgaaggagatgattaagtctggaatgaatgtggctcgtctgaacttctctcatggaactcatgagtaccatgcggagaccatcaagaatgtgcgcacagccacggaaagctttgcttctgaccccatcctctaccggcccgttgctgtggctctagacactaaaggacctgagatccgaactgggctcatcaagggcagcggcactgcagaggtggagctgaagaagggagccactctcaaaatcacgctggataacgcctacatggaaaagtgtgacgagaacatcctgtggctggactacaagaacatctgcaaggtggtggaagtgggcagcaagatctacgtggatgatgggcttatttctctccaggtgaagcagaaaggtgccgacttcctggtgacggaggtggaaaatggtggctccttgggcagcaagaagggtgtgaaccttcctggggctgctgtggacttgcctgctgtgtcggagaaggacatccaggatctgaagtttggggtcgagcaggatgttgatatggtgtttgcgtcattcatccgcaaggcatctgatgtccatgaagttaggaaggtcctgggagagaagggaaagaacatcaagattatcagcaaaatcgagaatcatgagggggttcggaggtttgatgaaatcctggaggccagtgatgggatcatggtggctcgtggtgatctaggcattgagattcctgcagagaaggtcttccttgctcagaagatgatgattggacggtgcaaccgagctgggaagcctgtcatctgtgctactcagatgctggagagcatgatcaagaagccccgccccactcgggctgaaggcagtgatgtggccaatgcagtcctggatggagccgactgcatcatgctgtctggagaaacagccaaaggggactatcctctggaggctgtgcgcatgcagcacctgatagctcgtgaggctgaggcagccatgttccaccgcaagctgtttgaagaacttgtgcgagcctcaagtcactccacagacctcatggaagccatggccatgggcagcgtggaggcttcttataagtgtttagcagcagctttgatagttctgacggagtctggcaggtctgctcaccaggtggccagataccgcccacgtgcccccatcattgctgtgacccggaatccccagacagctcgtcaggcccacctgtaccgtggcatcttccctgtgctgtgcaaggacccagtccaggaggcctgggctgaggacgtggacctccgggtgaactttgccatgaatgttggcaaggcccgaggcttcttcaagaagggagatgtggtcattgtgctgaccggatggcgccctggctccggcttcaccaacaccatgcgtgttgttcctgtgccgtgatggaccccagagcccctcctccagcccctgtcccacccccttcccccagcccatccattaggccagcaacgcttgtagaactcactctgggctgtaacgtggcactggtaggttgggacaccagggaagaagatcaacgcctcactgaaacatggctgtgtttgcagcctgctctagtgggacagcccagagcctggctgcccatcatgtggccccacccaatcaagggaagaaggaggaatgctggactggaggcccctggagccagatggcaagagggtgacagcttcctttcctgtgtgtactctgtccagttcctttagaaaaaatggatgcccagaggactcccaaccctggcttggggtcaagaaacagccagcaagagttaggggccttagggcactgggctgttgttccattgaagccgactctggccctggcccttacttgcttctctagctctctaggcctctccagtttgcacctgtccccaccctccactcagctgtcctgcagcaaacactccaccctccaccttccattttcccccactactgcagcacctccaggcctgttgctatagagcctacctgtatgtcaataaacaacagctgaagcacc

SEQ ID NO: 1020 - DNA, 10837 bp, Homo sapiens
  misc_feature (699)..(699): second gene starts at position 699
atgaccacctccatccgccagttcacctcctccagctccatcaagggctcctccggcctggggggcggctcgtcccgcacctcctgccggctgtctggcggcctgggtgccggctcctgcaggctgggatctgctggcggcctgggcagcaccctcgggggtagcagctactccagctgctacagctttggctctggtggtggctatggcagcagctttgggggtgttgatgggctgctggctggaggtgagaaggccaccatgcagaacctcaatgaccgcctggcctcctacctggacaaggtgcgtgccctggaggaggccaacactgagctggaggtgaagatccgtgactggtaccagaggcaggccccggggcccgcccgtgactacagccagtactacaggacaattgaggagctgcagaacaagatcctcacagccaccgtggacaatgccaacatcctgctacagattgacaatgcccgtctggctgctgatgacttccgcaccaagtttgagacagagcaggccctgcgcctgagtgtggaggccgacatcaatggcctgcgcagggtgctggatgagctgaccctggccagagccgacctggagatgcagattgagaacctcaaggaggagctggcctacctgaagaagaaccacgaggaggagatgaacgccctgcgaggccaggtacattgattcaccacccatcacagcccggaacactggcatcatctgtaccattggcccagcttcccgatcagtggagacgttgaaggagatgattaagtctggaatgaatgtggctcgtctgaacttctctcatggaactcatgagtaccatgcggagaccatcaagaatgtgcgcacagccacggaaagctttgcttctgaccccatcctctaccggcccgttgctgtggctctagacactaaaggacctgagatccgaactgggctcatcaagggcagcggcactgcagaggtggagctgaagaagggagccactctcaaaatcacgctggataacgcctacatggaaaagtgtgacgagaacatcctgtggctggactacaagaacatctgcaaggtggtggaagtgggcagcaagatctacgtggatgatgggcttatttctctccaggtgaagcagaaaggtgccgacttcctggtgacggaggtggaaaatggtggctccttgggcagcaagaagggtgtgaaccttcctggggctgctgtggacttgcctgctgtgtcggagaaggacatccaggatctgaagtttggggtcgagcaggatgttgatatggtgtttgcgtcattcatccgcaaggcatctgatgtccatgaagttaggaaggtcctgggagagaagggaaagaacatcaagattatcagcaaaatcgagaatcatgagggggttcggaggtttgatgaaatcctggaggccagtgatgggatcatggtggctcgtggtgatctaggcattgagattcctgcagagaaggtcttccttgctcagaagatgatgattggacggtgcaaccgagctgggaagcctgtcatctgtgctactcagatgctggagagcatgatcaagaagccccgccccactcgggctgaaggcagtgatgtggccaatgcagtcctggatggagccgactgcatcatgctgtctggagaaacagccaaaggggactatcctctggaggctgtgcgcatgcagcacctgatagctcgtgaggctgaggcagccatgttccaccgcaagctgtttgaagaacttgtgcgagcctcaagtcactccacagacctcatggaagccatggccatgggcagcgtggaggcttcttataagtgtttagcagcagctttgatagttctgacggagtctggcaggtctgctcaccaggtggccagataccgcccacgtgcccccatcattgctgtgacccggaatccccagacagctcgtcaggcccacctgtaccgtggcatcttccctgtgctgtgcaaggacccagtccaggaggcctgggctgaggacgtggacctccgggtgaactttgccatgaatgttggcaaggcccgaggcttcttcaagaagggagatgtggtcattgtgctgaccggatggcgccctggctccggcttcaccaacaccatgcgtgttgttcctgtgccgtgatggaccccagagcccctcctccagcccctgtcccacccccttcccccagcccatccattaggccagcaacgcttgtagaactcactctgggctgtaacgtggcactggtaggttgggacaccagggaagaagatcaacgcctcactgaaacatggctgtgtttgcagcctgctctagtgggacagcccagagcctggctgcccatcatgtggccccacccaatcaagggaagaaggaggaatgctggactggaggcccctggagccagatggcaagagggtgacagcttcctttcctgtgtgtactctgtccagttcctttagaaaaaatggatgcccagaggactcccaaccctggcttggggtcaagaaacagccagcaagagttaggggccttagggcactgggctgttgttccattgaagccgactctggccctggcccttacttgcttctctagctctctaggcctctccagtttgcacctgtccccaccctccactcagctgtcctgcagcaaacactccaccctccaccttccattttcccccactactgcagcacctccaggcctgttgctatagagcctacctgtatgtcaataaacaacagctgaagcacccgccgcgcttcctcctgaaggtgactgcgcccgcggggacgcagggggcggggcccgggtcgcccggagccgggattgggcagagggcggggcggcggagggattgcggcggcccgcagcgggataaccttgaggctgaggcagtggctccttgcacagcagctgcacgcgccgtggctccggatctcttcgtctttgcagcgtagcccgagtcggtcagcgccggaggtgagcggtgcaggaggctacgccatcagtccccaccaagggccagtcgcccggctagtgcggaatcccggcgcgccggccggccccgggcacgcaggcagggcggcgcaggatccagggcgtctgggatgcagtggagctcagagagaggagaacggctcctcacgcctggggcctgctcttcagaagtccccagcgccgttccttccagatcaggacctcagcagccatgtcgaagccccatagtgaagccgggactgccttcattcagacccagcagctgcacgcagccatggctgacacattcctggagcacatgtgccgcctggacattgattcaccacccatcacagcccggaacactggcatcatctgtaccattggcccagcttcccgatcagtggagacgttgaaggagatgattaagtctggaatgaatgtggctcgtctgaacttctctcatggaactcatgagtaccatgcggagaccatcaagaatgtgcgcacagccacggaaagctttgcttctgaccccatcctctaccggcccgttgctgtggctctagacactaaaggacctgagatccgaactgggctcatcaagggcagcggcactgcagaggtggagctgaagaagggagccactctcaaaatcacgctggataacgcctacatggaaaagtgtgacgagaacatcctgtggctggactacaagaacatctgcaaggtggtggaagtgggcagcaagatctacgtggatgatgggcttatttctctccaggtgaagcagaaaggtgccgacttcctggtgacggaggtggaaaatggtggctccttgggcagcaagaagggtgtgaaccttcctggggctgctgtggacttgcctgctgtgtcggagaaggacatccaggatctgaagtttggggtcgagcaggatgttgatatggtgtttgcgtcattcatccgcaaggcatctgatgtccatgaagttaggaaggtcctgggagagaagggaaagaacatcaagattatcagcaaaatcgagaatcatgagggggttcggaggtttgatgaaatcctggaggccagtgatgggatcatggtggctcgtggtgatctaggcattgagattcctgcagagaaggtcttccttgctcagaagatgatgattggacggtgcaaccgagctgggaagcctgtcatctgtgctactcagatgctggagagcatgatcaagaagccccgccccactcgggctgaaggcagtgatgtggccaatgcagtcctggatggagccgactgcatcatgctgtctggagaaacagccaaaggggactatcctctggaggctgtgcgcatgcagcacctgatagctcgtgaggctgaggcagccatgttccaccgcaagctgtttgaagaacttgtgcgagcctcaagtcactccacagacctcatggaagccatggccatgggcagcgtggaggcttcttataagtgtttagcagcagctttgatagttctgacggagtctggcaggtctgctcaccaggtggccagataccgcccacgtgcccccatcattgctgtgacccggaatccccagacagctcgtcaggcccacctgtaccgtggcatcttccctgtgctgtgcaaggacccagtccaggaggcctgggctgaggacgtggacctccgggtgaactttgccatgaatgttggcaaggcccgaggcttcttcaagaagggagatgtggtcattgtgctgaccggatggcgccctggctccggcttcaccaacaccatgcgtgttgttcctgtgccgtgatggaccccagagcccctcctccagcccctgtcccacccccttcccccagcccatccattaggccagcaacgcttgtagaactcactctgggctgtaacgtggcactggtaggttgggacaccagggaagaagatcaacgcctcactgaaacatggctgtgtttgcagcctgctctagtgggacagcccagagcctggctgcccatcatgtggccccacccaatcaagggaagaaggaggaatgctggactggaggcccctggagccagatggcaagagggtgacagcttcctttcctgtgtgtactctgtccagttcctttagaaaaaatggatgcccagaggactcccaaccctggcttggggtcaagaaacagccagcaagagttaggggccttagggcactgggctgttgttccattgaagccgactctggccctggcccttacttgcttctctagctctctaggcctctccagtttgcacctgtccccaccctccactcagctgtcctgcagcaaacactccaccctccaccttccattttcccccactactgcagcacctccaggcctgttgctatagagcctacctgtatgtcaataaacaacagctgaagcacccgccgcgcttcctcctgaaggtgactgcgcccgcggggacgcagggggcggggcccgggtcgcccggagccgggattgggcagagggcggggcggcggagggattgcggcggcccgcagcgggataaccttgaggctgaggcagtggctccttgcacagcagctgcacgcgccgtggctccggatctcttcgtctttgcagcgtagcccgagtcggtcagcgccggaggtgagcggtgcaggaggctacgccatcagtccccaccaagggccagtcgcccggctagtgcggaatcccggcgcgccggccggccccgggcacgcaggcagggcggcgcaggatccagggcgtctgggatgcagtggagctcagagagaggagaacggctcctcacgcctggggcctgctcttcagaagtccccagcgccgttccttccagatcaggacctcagcagccatgtcgaagccccatagtgaagccgggactgccttcattcagacccagcagctgcacgcagccatggctgacacattcctggagcacatgtgccgcctggacattgattcaccacccatcacagcccggaacactggcatcatctgtaccattggcccagcttcccgatcagtggagacgttgaaggagatgattaagtctggaatgaatgtggctcgtctgaacttctctcatggaactcatgagtaccatgcggagaccatcaagaatgtgcgcacagccacggaaagctttgcttctgaccccatcctctaccggcccgttgctgtggctctagacactaaaggacctgagatccgaactgggctcatcaagggcagcggcactgcagaggtggagctgaagaagggagccactctcaaaatcacgctggataacgcctacatggaaaagtgtgacgagaacatcctgtggctggactacaagaacatctgcaaggtggtggaagtgggcagcaagatctacgtggatgatgggcttatttctctccaggtgaagcagaaaggtgccgacttcctggtgacggaggtggaaaatggtggctccttgggcagcaagaagggtgtgaaccttcctggggctgctgtggacttgcctgctgtgtcggagaaggacatccaggatctgaagtttggggtcgagcaggatgttgatatggtgtttgcgtcattcatccgcaaggcatctgatgtccatgaagttaggaaggtcctgggagagaagggaaagaacatcaagattatcagcaaaatcgagaatcatgagggggttcggaggtttgatgaaatcctggaggccagtgatgggatcatggtggctcgtggtgatctaggcattgagattcctgcagagaaggtcttccttgctcagaagatgatgattggacggtgcaaccgagctgggaagcctgtcatctgtgctactcagatgctggagagcatgatcaagaagccccgccccactcgggctgaaggcagtgatgtggccaatgcagtcctggatggagccgactgcatcatgctgtctggagaaacagccaaaggggactatcctctggaggctgtgcgcatgcagcacctgatagctcgtgaggctgaggcagccatgttccaccgcaagctgtttgaagaacttgtgcgagcctcaagtcactccacagacctcatggaagccatggccatgggcagcgtggaggcttcttataagtgtttagcagcagctttgatagttctgacggagtctggcaggtctgctcaccaggtggccagataccgcccacgtgcccccatcattgctgtgacccggaatccccagacagctcgtcaggcccacctgtaccgtggcatcttccctgtgctgtgcaaggacccagtccaggaggcctgggctgaggacgtggacctccgggtgaactttgccatgaatgttggcaaggcccgaggcttcttcaagaagggagatgtggtcattgtgctgaccggatggcgccctggctccggcttcaccaacaccatgcgtgttgttcctgtgccgtgatggaccccagagcccctcctccagcccctgtcccacccccttcccccagcccatccattaggccagcaacgcttgtagaactcactctgggctgtaacgtggcactggtaggttgggacaccagggaagaagatcaacgcctcactgaaacatggctgtgtttgcagcctgctctagtgggacagcccagagcctggctgcccatcatgtggccccacccaatcaagggaagaaggaggaatgctggactggaggcccctggagccagatggcaagagggtgacagcttcctttcctgtgtgtactctgtccagttcctttagaaaaaatggatgcccagaggactcccaaccctggcttggggtcaagaaacagccagcaagagttaggggccttagggcactgggctgttgttccattgaagccgactctggccctggcccttacttgcttctctagctctctaggcctctccagtttgcacctgtccccaccctccactcagctgtcctgcagcaaacactccaccctccaccttccattttcccccactactgcagcacctccaggcctgttgctatagagcctacctgtatgtcaataaacaacagctgaagcacccgccgcgcttcctcctgaaggtgactgcgcccgcggggacgcagggggcggggcccgggtcgcccggagccgggattgggcagagggcggggcggcggagggattgcggcggcccgcagcgggataaccttgaggctgaggcagtggctccttgcacagcagctgcacgcgccgtggctccggatctcttcgtctttgcagcgtagcccgagtcggtcagcgccggaggtgagcggtgcaggaggctacgccatcagtccccaccaagggccagtcgcccggctagtgcggaatcccggcgcgccggccggccccgggcacgcaggcagggcggcgcaggatccagggcgtctgggatgcagtggagctcagagagaggagaacggctcctcacgcctggggcctgctcttcagaagtccccagcgccgttccttccagatcaggacctcagcagccatgtcgaagccccatagtgaagccgggactgccttcattcagacccagcagctgcacgcagccatggctgacacattcctggagcacatgtgccgcctggacattgattcaccacccatcacagcccggaacactggcatcatctgtaccattggcccagcttcccgatcagtggagacgttgaaggagatgattaagtctggaatgaatgtggctcgtctgaacttctctcatggaactcatgagtaccatgcggagaccatcaagaatgtgcgcacagccacggaaagctttgcttctgaccccatcctctaccggcccgttgctgtggctctagacactaaaggacctgagatccgaactgggctcatcaagggcagcggcactgcagaggtggagctgaagaagggagccactctcaaaatcacgctggataacgcctacatggaaaagtgtgacgagaacatcctgtggctggactacaagaacatctgcaaggtggtggaagtgggcagcaagatctacgtggatgatgggcttatttctctccaggtgaagcagaaaggtgccgacttcctggtgacggaggtggaaaatggtggctccttgggcagcaagaagggtgtgaaccttcctggggctgctgtggacttgcctgctgtgtcggagaaggacatccaggatctgaagtttggggtcgagcaggatgttgatatggtgtttgcgtcattcatccgcaaggcatctgatgtccatgaagttaggaaggtcctgggagagaagggaaagaacatcaagattatcagcaaaatcgagaatcatgagggggttcggaggtttgatgaaatcctggaggccagtgatgggatcatggtggctcgtggtgatctaggcattgagattcctgcagagaaggtcttccttgctcagaagatgatgattggacggtgcaaccgagctgggaagcctgtcatctgtgctactcagatgctggagagcatgatcaagaagccccgccccactcgggctgaaggcagtgatgtggccaatgcagtcctggatggagccgactgcatcatgctgtctggagaaacagccaaaggggactatcctctggaggctgtgcgcatgcagcacctgatagctcgtgaggctgaggcagccatgttccaccgcaagctgtttgaagaacttgtgcgagcctcaagtcactccacagacctcatggaagccatggccatgggcagcgtggaggcttcttataagtgtttagcagcagctttgatagttctgacggagtctggcaggtctgctcaccaggtggccagataccgcccacgtgcccccatcattgctgtgacccggaatccccagacagctcgtcaggcccacctgtaccgtggcatcttccctgtgctgtgcaaggacccagtccaggaggcctgggctgaggacgtggacctccgggtgaactttgccatgaatgttggcaaggcccgaggcttcttcaagaagggagatgtggtcattgtgctgaccggatggcgccctggctccggcttcaccaacaccatgcgtgttgttcctgtgccgtgatggaccccagagcccctcctccagcccctgtcccacccccttcccccagcccatccattaggccagcaacgcttgtagaactcactctgggctgtaacgtggcactggtaggttgggacaccagggaagaagatcaacgcctcactgaaacatggctgtgtttgcagcctgctctagtgggacagcccagagcctggctgcccatcatgtggccccacccaatcaagggaagaaggaggaatgctggactggaggcccctggagccagatggcaagagggtgacagcttcctttcctgtgtgtactctgtccagttcctttagaaaaaatggatgcccagaggactcccaaccctggcttggggtcaagaaacagccagcaagagttaggggccttagggcactgggctgttgttccattgaagccgactctggccctggcccttacttgcttctctagctctctaggcctctccagtttgcacctgtccccaccctccactcagctgtcctgcagcaaacactccaccctccaccttccattttcccccactactgcagcacctccaggcctgttgctatagagcctacctgtatgtcaataaacaacagctgaagcacc

SEQ ID NO: 1021 - DNA, 10481 bp, Homo sapiens
  misc_feature (331)..(331): second gene starts at position 331
agcgcagcgcagggagcgcaggcggtggcggcaccaggttcccggggctccagcgctcggcgcagcgaagtagcctccggcggtggcaactacggcggcggcgccggggcgatgctgtgggtctcgttgggcgccggtgtcctggcctcttcctcagaacgaagaacaaactaaattcatctcaaaatgattataaatcatcaagaaggagtagcctgccacctgaactactcataggaaatgacattagaggaagacttcaaagaaacattaagaacttggatcccattcacctgaggcacccgaagaagagaccatccatatttccagcttctcccgttggcaacggttacatcaagcctccggttccacctgcttctggcacgcacagggagaaagggccgccaaccatgctacccatcaatgtggacccagacagtaaaccaggagaatatgtcctcaaaagtttatttgtcaacttcaccactcaggctgaacgcaagattcgtatcattatggcagagcccctggaaaagccattgacaaaatctctgcaacgtggagaagacccccaatttgatcaggtcatcagctcaatgagctccctttctgagtactgcctgccttccattctacgtacattatttgactggtataaaaggcaaaatggcattgaggatgaatcacatgaatacagaccaagaacaagcaataaatcaaaaagcgatgaacaacagcgagattatttaatggaaagacgggacctcgccattgattttattttttctttagtattaatagaagttttgaaacagattccacttcatcctgtaatagacagtttaatacatgatgttattaacttggctttcaagcactttaaatacaaagaagggtaccttggtcccaacactggcaatatgcatattgtggcagacctgtatgcagaagtcattggagtgttggcacaagccaaattccctgctgtaaagaagaaatttatggcggagctaaaagaattacggcacaaagagcagaacccatatgtggttcaaagcattatcagcttaataatgggcatgaaattctttcgaattaagatgtatccagtggaggattttgaggcctctcttcagtttatgcaggaatgtgcacattacttcctcgaggtcaaagacaaagatatcaagcatgccttggctgggctttttgttgaaatacttgttccagttgctgctgctgttaaaaatgaagtaaatgttccctgccttagaaattttgtggaaagcctgtatgacaccacgctggaactttcttctcgaaagaagcattccttggccttgtaccccctggtgacctgtttgctctgtgtcagtcagaagcagctgttcctgaacaggtggcacattttcctcaacaactgcttgtccaaccttaaaaacaaagatcccaagatggctcgagttgcactggaatctctctacagattactttgggtttacatgattcgaattaaatgtgaaagcaacacagctactcagagccgacttataaccatcatcacaacacttttccccaaagggtcccgcggtgtggtaccaagggacatgcctctgaacatctttgtgaaaatcatccagttcattgcccaggaacgtttagattttgcaatgaaagaaatcattttcgattttctttgtgtgggaaaaccagcaaaagcattcagtctcaacccagagagaatgaacattggtttacgggcattcttggtcatagctgatagcttgcagcagaaagatggggaacctcccatgccggttacaggagccgttcttccttcaggaaacacgttaagagtaaagaaaacatatttgagtaaaacactaactgaagaggaagccaaaatgataggcatgtccttatattactctcaagtacgaaaagctgtagacaacattttaaggcaccttgataaagaagtaggaaggtgtatgatgctgactaatgtacagatgttaaacaaagaaccggaagacatgatcacgggtgagagaaagccaaaaatagatcttttcaggacctgtgttgctgctattcctcgactgcttcctgatgggatgtcaaaacttgaacttattgacttactggctaggctctctattcatatggatgatgaattgcgacatattgcacaaaattctcttcagggtttacttgttgacttctcagattggagggaagatgtactatttggctttaccaacttcctgctccgggaagtaaatgatatgcatcacacactccttgattcgtccctgaagttgctgctgcagctgctcacccagtggaaactagtcatccagacacaaggaaaagtctatgaacaagccaacaaaatcagaaattcagagctcatcgcaaatggctccagtcacagaattcagtcggaacgaggtccccactgcagtgtactccacgctgtagaaggttttgctctggttttactctgcagtttccaggtggccacacgcaaactgtccgttttaatactcaaggaaattcgagcgttgtttattgccctggggcagcctgaggatgacgacaggccgatgattgatgtcatggatcagctaagttcttccattctagaaagttttattcatgtagcagtttcggattcagcaacattaccactcacccacaatgtggatctgcagtggttggtggaatggaacgcagtcctggtcaatagccattatgatgtgaaaagcccttcccatgtctggatatttgcacagtctgtcaaagacccctgggtcctctgcctcttcagcttcctccggcaggagaacttacccaagcactgccccacagccctcagctatgcctggccttatgccttcactcggctccagtcggtgatgcctctggtggacccaaatagcccaattaatgccaagaaaaccagcactgccggcagcggagacaactatgttactttgtggagaaattacctaattctttgttttggagttgcaaaacccagtattatgagcccaggacacttaagagcttccactccagaaataatggcgaccacacctgatggtacagtgagctacgataacaaggccataggcaccccatcggtgggagttctgttaaagcagttggtgcctttgatgagactagagagcattgagatcacagagtccttagttttaggatttggaagaacaaattcccttgttttcagagaattggtagaagaacttcatccattaatgaaagaagctctggaaagaagaccagagaacaagaaacgccgagaacggcgagacttgttaaggctacaactacttcgaatttttgaacttttggctgatgctggtgtaataagtgacagcacaaatggagccctagagcgggatactttagccctgggagctttgttcttagaatatgtggacttgacccgcatgctcctagaagctgaaaatgacaaagaagttgaaattcttaaagatatccgggcacattttagtgcaatggtggccaacttgattcagtgtgttccagttcaccaccgaagatttctcttcccccagcaaagtctgaggcaccaccttttcatcttattcagccagtgggcaggacccttcagcattatgttcactcctctggatcgttacagtgacagaaatcatcagattacaagatatcagtattgtgcattaaaagcaatgtcagcagtactgtgctgtggccctgtctttgacaatgtgggcctttccccagatggctacctatataaatggcttgacaacattctggcttgtcaagatttacgagttcatcaacttggctgcgaagttgttgtcttgctactggaacttaatcctgaccaaataaatctttttaactgggcaattgaccgatgctacacaggttcctaccaacttgcatctggctgcttcaaagccatagcaactgtgtgtggaagcaggaactatcccttcgacatagtgacattgttaaaccttgttctattcaaggcctctgacaccaacagagagatttatgaaatctccatgcagctcatgcagatccttgaagcaaagctttttgtatactcaaagaaagtcgctgagcaaagaccgggaagtattctctatggaacacacggcccgctgccacccctctacagcgtgtcacttgccctcttgtcatgtgagctggccaggatgtaccctgagctcacactccccctcttctcagaggtaagccagcgattccccacaacacaccccaacgggcgccagatcatgcttacctacctgctgccctggctgcacaacatcgagctggtggacagcaggctcctcctcccggggtcgagccccagcagcccagaggacgaagtcaaggaccgggaaggtgacgtgactgcttctcacgggctgagaggaaatggctggggctctccagaagccacgtcactggtcctgaacaacctcatgtacatgacggccaagtatggagatgaagttcctgggccagaaatggaaaatgcttggaatgctttagccaacaatgagaaatggagcaacaacctgaggatcaccttgcagttcctgattagcctctgtggggtcagcagcgacacagttctcctaccctatattaaaaaagtggcaatatacttgtgccgtaacaacaccattcaaaccatggaagagcttctctttgagctgcagcagacagagcccgtgaaccccatcgtccagcattgtgacaacccgcccttctaccgcttcacggccagtagcaaggcttccgcagcagcctcaggaaccacctctagcagcaatacagtggttgctggccaggaaaatttcccagatgctgaggagaacaagatattgaaagaatctgatgaaaggtttagtaatgtcatcagagcccacactcgcctcgagtcaagatacagcaatagctctggaggatcctacgatgaagataaaaatgatccaatttctccctacacgggctggttgctgactattacagagaccaagcagccgcagcccttaccgatgccttgtactggaggatgctgggcccccctggttgactatctcccggagaccatcactccccgggggccactccacaggtgcaatattgctgtaatttttatgactgaaatggtggtggatcacagtgtacgagaagactgggcgcttcatctaccattattacttcatgctgtcttcttaggtttagaccactaccggcctgaagtctttgaacacagcaaaaaactgcttcttcacctcttgattgccctctcttgcaacagcaatttccattccattgcttccgtgctcctgcagacccgagagatgggtgaagctaagactctaaccgtgcagccagcctaccaacctgaatatctctatacaggtggctttgacttcctgagagaggaccagtcatccccggtgcctgactcagggcttagttcaagctccacctcctctagcatcagtctgggaggcagcagtggaaacctcccacagatgacccaggaggtagaagatgtggacacagctgctgaaacagatgagaaggcaaacaagctcattgagtttctcacgaccagggcatttggtccactttggtgccatgaagacatcacacctaaaaatcaaaattcaaagagtgctgaacagctcactaattttctacgtcacgttgtatctgtatttaaagattccaaatcaggcttccatctggagcaccagttgagtgaagttgcattgcagacagccctcgcaagctcttcaaggcactatgctggtcggtccttccagatattccgggccctcaagcaacctctgtcagcacatgccttatctgaccttctctcaagattggtggaggtgataggagaacatggagatgagattcagggttatgtaatggaagcgctcctaaccttggaggcggctgtggataacttgtctgactgcttgaagaacagtgacctcctaactgtattgtcccgctcttcctcaccagatttaagctccagcagtaaactaacagcaagcagaaagagcacaggacaactaaacatgaacccgggaaccaccagcggcaacaccgcaactgccgaacggagccggcatcaacgaagcttctctgtgcccaagaagtttggtgtcatcgaccgatcctctgacccacctcgaagtgccacactggacagaattcaggcttgtacccaacaaggcctctcctcaaaaaccagaagctcatcctccttgaaggacagtctcacggacccatcccacataaaccatcccaccaacctgctggccaccatattctgggtcacagtggccttgatggagtctgattttgagtttgaatacttaatggccttaaggctgttgagcagactactggcacatatgccactcgataaggctgagaaccgagaaaagcttgagaaactccaggcacagctgaagtgggccgacttctccgggctgcagcagctgctgctgaaaggattcacatccctcaccaccacagacctgaccctgcagctcttcagtctgctgacaccagtgtccaaaatatccatggtggatgcatcccacgctattgggtttccactgaatgtcttgtgtctcctgcctcagctgattcagcattttgaaaatcccaatcagttctgtaaggatatagccgaaaggattgctcaggtttgtttagaagagaagaaccccaaactttcaaatcttgcacatgtcatgactctttataaaacgcacagctacacgagggactgtgccacgtgggtcaatgtggtctgtcgataccttcatgaagcatatgctgacattaccttgaatatggttacctacctggcagagctgctggagaagggcctccctagtgtgcagcagcccctgctccaggtgatctacagtcttctcagctacatggacctttctgtcgttcctgtcaaacagttcaatgtggaagttctgaagacaattgaaaaatatgtgcaaagtgttcactggagagaagctctgaatatcttgaagctggtagtttctcggtcagccagccttgttttaccttcataccagcacagtgacctctcaaaaatagaaatacatcgagtgtggactagtgcttccaaggaattacctgggaaaaccctggacttccacttcgatatttcggagactccaatcatcgggaggcggtatgatgagctgcagaattcttctgggcgtgatgggaagcccagggccatggccgtcacccggagcacatcttccacttcctcaggctccaactccaacgtccttgttccagtgagctggaaaaggccccagtattctcagaagagaacaaaagagaagttggtacatgtcctttctctgtgtggccaagaagtaggattgagcaaaaatccatcagtgattttttcatcgtgtggggatctggatctgcttgagcaccagacaagcttggtatcttctgaggacggtgcccgagagcaggagaacatggatgacacaaacagcgagcagcagtttagagtcttcagagacttcgacttcctagatgtggagctggaggatggagagggtgagagtatggacaatttcaactggggagtgcgcagacgttctctggacagcctggataagtgtgatatgcagattctggaggagcgccaactgtcaggaagcactcctagcctgaataaaatgcaccatgaggactccgatgaatcatccgaggaggaggacctcacagccagccagatcctggagcactcagacctaatcatgactctctccccctctgaagagacgaatcccatggagctgctcaccacagcctgtgactcgacccctgcagaacctcattcctttaacaccagaatgtccagctttgatgcttccttgcctgatatgaataatctgcagatttctgagggttcaaaggctgaagctgttcgtgaggaggaggacaccaccgtgcatgaggatgatctttctagttccatcaatgaactcccagcagcttttgaatgcagcgacagctttagcctggacatgactgagggggaagaaaaaggcaatcgggcactggaccagtttaccctggcgagctttggagaaggtgacaggggagtctctccccctccctcgcccttcttctcagccatccttgccgcctttcagcccgcagcctgtgacgatgccgaggaggcctggcgcagccacatcaaccagcttatgtgtgactcagatggctcctgtgctgtgtatacatttcatgtgttctcctccttgtttaagaatattcagaaaaggttctgcttcctaacctgtgatgcagccagttaccttggagataacctccggggaatcggatccaaatttgtcagctcttcccagatgctcacctcctgctctgaatgtcctacactttttgtggatgccgagactctcctttcatgtggacttctggacaagctcaagttcagtgtgttagaactgcaagaatatttggatacctacaacaacaggaaagaggccacactctcttggcttgcaaattgtaaggcaacatttgcagggggatcaagagatggagtaattacctgtcaaccaggggactccgaagaaaagcaattggaactgtgtcagagattatataagctacacttccagctgctattgctttttcagtcctactgtaagctcatcggccaggtgcacgaagttagctccatgccagagctgctgaatatgtccagggaactgagtgacctaaagaaacacctgaaggaagccagtgcagtcattgcagctgaccctctctattcagacggcgcgtggtccgagcccaccttcacgtccactgaagcagccatccagtccatgctggagtgcctgaagaacaacgaactcggcaaagctttgcggcagatcagggagtgcagaagtctgtggcccaatgacatctttggaagcagttctgatgatgaggtccagacactactgaatatttatttccgtcaccaaactctgggacagacgggtacttatgccctggtggggtctaaccagagcctgaccgagatctgcaccaagctgatggagctgaacatggagatccgggacatgatccgcagggcccagagttaccgagtcctcactacttttcttccagactccagtgtttctggcactagtctctgacaggagcctcctgtccccactgggttccaaactggcagtgctgccatgctggggcaacgtcattcagtgtcttctcggccttcaaaaggcttggacagactgttctccctcttgttacctgtagggctttttctaaagaggatggcagaacttccaacgtgtagcaatactataagaaccaaggtagcttagaacgtcctggacagactccactcatcatgctgtgtggcacaaatgtgttacatttgaccgagcatatgcaactcgctactgaagaagtgacttccgttgcataccaaagccgactacactgaacagtaccttcctttctagaaacaattttagattggcaaaagtgcaatgttttcttcactcaaaaaattttatattctcaaacatgtatattctttccctgtcttgttccattttcttttcttttttcttttttctttttcctttctttcgtgggctgagaaaggggcaggcaaaatgaagctggccactgaaaactgtaagatggtcaaaagctgacagcctgtgtatgtgaaaagggaattgtaaatggactgcaatgtaatgtacactgtaatttgaatacaattactgtatctaaaaggagctgctatgaagtacctttcttatgttgctaggctactgtttctgaaagccctggatctctttgcaccaaaaatggtccagatagactctttttaaggatcttggctgctttttactagaaggttgcttttatgagcatatttatactgctgaaggatgagtgttaattttaattaactttgccgttttgtagagaaaactattcacaagataaattccaagtcttttcacctgtcaggcatgcatattttaatatctgtttggatagtcagaagtagaatcataaaggtaaaatatgagttgttactttgtttcttcgatgtcatattttatgtgtaatatatatgtaaagggccattcttaagttctctccttaaacttaatgctgtcaagtgttagatgtgtgcatgtgaacttgttgcactgcagaaacatattcagagtttatctatgtaacttattcactctgtaaatacatttaaagtttttgtgatgtaagcttaattgatattctgttcagaactttctttagactaaaaaaaaaaaaaaagacaaaataca

SEQ ID NO: 1022 - DNA, 10481 bp, Homo sapiens; identical to SEQ ID NO: 1021
  misc_feature (331)..(331): second gene starts at position 331

SEQ ID NO: 1023 - DNA, 10481 bp, Homo sapiens; identical to SEQ ID NO: 1021
  misc_feature (331)..(331): second gene starts at position 331

SEQ ID NO: 1024 - DNA, 10481 bp, Homo sapiens; identical to SEQ ID NO: 1021
  misc_feature (331)..(331): second gene starts at position 331

SEQ ID NO: 1025 - DNA, 10481 bp, Homo sapiens; identical to SEQ ID NO: 1021
  misc_feature (331)..(331): second gene starts at position 331

SEQ ID NO: 1026 - DNA, 16569 bp, Homo sapiens
  misc_feature (282)..(282): second gene starts at position 282
atgaccaccacatttctgcaaacttcttcctccacctttgggggtggctcaacccgagggggttccctcctggctgggggaggtggctttggtggggggagtctctctgggggaggtggaagccgaagtatctcagcttcttctgctaggtttgtctcttcagggtcaggaggaggatatgggggtggcatgagggtctgtggctttggtggaggggctggtagtgttttcggtggaggctttggagggggcgttggtgggggttttggtggtggctttggtggtggcgatggtggtctcctctctggcaatgagaaaattaccatgcagaacctcaatgaccgcctggcctcctacctggacaaggtacgtgccctggaggaggccaatgctgacctggaggtgaagatccatgactggtaccagaagcagaccccaaccagcccagaatgcgactacagccaatacttcaagaccattgaagagctccgggacaagatcatggccaccaccatcgacaactcccgggtcatcctggagatcgacaatgccaggctggctgcggacgacttcaggctcaagtatgagaatgagctggccctgcgccagggcgttgaggctgacatcaacggcttgcgccgagtcctggatgagctgaccctggccaggactgacctggagatgcagatcgagggcctgaatgaggagctagcctacctgaagaagaaccacgaagaggagatgaaggagttcagcagccagctggccggccaggtcaatgtggagatggacgcagcaccgggtgtggacctgacccgtgtgctggcagagatgagggagcagtacgaggccatggcggagaagaaccgccgggatgtcgaggcctggttcttcagcaagactgaggagctgaacaaagaggtggcctccaacacagaaatgatccagaccagcaagacggagatcacagacctgagacgcacgatgcaggagctggagatcgagctgcagtcccagctcagcatgaaagctgggctggagaactcactggccgagacagagtgccgctatgccacgcagctgcagcagatccaggggctcattggtggcctggaggcccagctgagtgagctccgatgcgagatggaggctcagaaccaggagtacaagatgctgcttgacataaagacacggctggagcaggagatcgctacttaccgcagcctgctcgagggccaggatgccaagatggctggcattgccatcagggaagcctcttcaaccaccacctcctcctccagcaggaagagctataagcactaaagtgcgtctgctagctctcggtcccacagtcctcaggcccctctctggctgcagagccctctcctcaggttgcctttcctctcctggcctccagtctcccctgctgtcccaggtagagctgggtatggatgcttagtgccctcacttcttctctctctctctataccatctgagcacccattgctcaccatcagatcaacctctgattttacatcatgatgtaatcaccactggagcttcactgttactaaattattaatttcttgcctccagtgttctatctctgaggctgagcattataagaaaatgacctctgctccttttcattgcagaaaattgccaggggcttatttcagaacaacttccacttactttccactggctctcaaactctctaacttataagtgttgtgaacccccacccaggcagtatccatgaaagcacaagtgactagtcctatgatgtacaaagcctgtatctctgtgatgatttctgtgctcttcgctgtttgcaattgctaaataaagcagatttataatacaataatatttcatacctttctagaaactgggtgtgatctcactgttggtaaagcccagcccttcccaacctgcaagctcaccttccaggactgggcccagcccatgctctccatatataagctgctgccccgagcctgattcctagtcctgcttctcttccctctctcctccagcctctcacactctcctcagctctctcatctcctggaaccatggccagcacatccaccaccatcaggagccacagcagcagccgccggggtttcagtgccaactcagccaggctccctggggtcagccgctctggcttcagcagcgtctccgtgtcccgctccaggggcagtggtggcctgggtggtgcatgtggaggagctggctttggcagccgcagtctgtatggcctggggggctccaagaggatctccattggagggggcagctgtgccatcagtggcggctatggcagcagagccggaggcagctatggctttggtggcgccgggagtggatttggtttcggtggtggagccggcattggctttggtctgggtggtggagccggccttgctggtggctttgggggccctggcttccctgtgtgcccccctggaggcatccaagaggtcaccgtcaaccagagtctcctgactcccctcaacctgcaaatcgatcccaccatccagcgggtgcgggctgaggagcgtgaacagatcaagaccctcaacaacaagtttgcctccttcatcgacaaggtgcggttcctggagcagcagaacaaggttctggaaacaaagtggaccctgctgcaggagcagggcaccaagactgtgaggcagaacctggagccgttgttcgagcagtacatcaacaacctcaggaggcagctggacagcattgtcggggaacggggccgcctggactcagagctcagaggcatgcaggacctggtggaggacttcaagaacaaatatgaggatgaaatcaacaagcgcacagcagcagagaatgaatttgtgactctgaagaaggatgtggatgctgcctacatgaacaaggttgaactgcaagccaaggcagacactctcacagacgagatcaacttcctgagagccttgtatgatgcagagctgtcccagatgcagacccacatctcagacacatctgtggtgctgtccatggacaacaaccgcaacctggacctggacagcatcatcgctgaggtcaaggcccaatatgaggagattgctcagagaagccgggctgaggctgagtcctggtaccagaccaagtacgaggagctgcaggtcacagcaggcagacatggggacgacctgcgcaacaccaagcaggagattgctgagatcaaccgcatgatccagaggctgagatctgagatcgaccacgtcaagaagcagtgcgccaacctgcaggccgccattgctgatgctgagcagcgtggggagatggccctcaaggatgccaagaacaagctggaagggctggaggatgccctgcagaaggccaagcaggacctggcccggctgctgaaggagtaccaggagctgatgaatgtcaagctggccctggacgtggagatcgccacctaccgcaagctgctggagggtgaggagtgcaggctgaatggcgaaggcgttggacaagtcaacatctctgtggtgcagtccaccgtctccagtggctatggcggtgccagtggtgtcggcagtggcttaggcctgggtggaggaagcagctactcctatggcagtggtcttggcgttggaggtggcttcagttccagcagtggcagagccattgggggtggcctcagctctgttggaggcggcagttccaccatcaagtacaccaccacctcctcctccagcaggaagagctataagcactaaagtgcgtctgctagctctcggtcccacagtcctcaggcccctctctggctgcagagccctctcctcaggttgcctttcctctcctggcctccagtctcccctgctgtcccaggtagagctgggtatggatgcttagtgccctcacttcttctctctctctctataccatctgagcacccattgctcaccatcagatcaacctctgattttacatcatgatgtaatcaccactggagcttcactgttactaaattattaatttcttgcctccagtgttctatctctgaggctgagcattataagaaaatgacctctgctccttttcattgcagaaaattgccaggggcttatttcagaacaacttccacttactttccactggctctcaaactctctaacttataagtgttgtgaacccccacccaggcagtatccatgaaagcacaagtgactagtcctatgatgtacaaagcctgtatctctgtgatgatttctgtgctcttcgctgtttgcaattgctaaataaagcagatttataatacaataatatttcatacctttctagaaactgggtgtgatctcactgttggtaaagcccagcccttcccaacctgcaagctcaccttccaggactgggcccagcccatgctctccatatataagctgctgccccgagcctgattcctagtcctgcttctcttccctctctcctccagcctctcacactctcctcagctctctcatctcctggaaccatggccagcacatccaccaccatcaggagccacagcagcagccgccggggtttcagtgccaactcagccaggctccctggggtcagccgctctggcttcagcagcgtctccgtgtcccgctccaggggcagtggtggcctgggtggtgcatgtggaggagctggctttggcagccgcagtctgtatggcctggggggctccaagaggatctccattggagggggcagctgtgccatcagtggcggctatggcagcagagccggaggcagctatggctttggtggcgccgggagtggatttggtttcggtggtggagccggcattggctttggtctgggtggtggagccggccttgctggtggctttgggggccctggcttccctgtgtgcccccctggaggcatccaagaggtcaccgtcaaccagagtctcctgactcccctcaacctgcaaatcgatcccaccatccagcgggtgcgggctgaggagcgtgaacagatcaagaccctcaacaacaagtttgcctccttcatcgacaaggtgcggttcctggagcagcagaacaaggttctggaaacaaagtggaccctgctgcaggagcagggcaccaagactgtgaggcagaacctggagccgttgttcgagcagtacatcaacaacctcaggaggcagctggacagcattgtcggggaacggggccgcctggactcagagctcagaggcatgcaggacctggtggaggacttcaagaacaaatatgaggatgaaatcaacaagcgcacagcagcagagaatgaatttgtgactctgaagaaggatgtggatgctgcctacatgaacaaggttgaactgcaagccaaggcagacactctcacagacgagatcaacttcctgagagccttgtatgatgcagagctgtcccagatgcagacccacatctcagacacatctgtggtgctgtccatggacaacaaccgcaacctggacctggacagcatcatcgctgaggtcaaggcccaatatgaggagattgctcagagaagccgggctgaggctgagtcctggtaccagaccaagtacgaggagctgcaggtcacagcaggcagacatggggacgacctgcgcaacaccaagcaggagattgctgagatcaaccgcatgatccagaggctgagatctgagatcgaccacgtcaagaagcagtgcgccaacctgcaggccgccattgctgatgctgagcagcgtggggagatggccctcaaggatgccaagaacaagctggaagggctggaggatgccctgcagaaggccaagcaggacctggcccggctgctgaaggagtaccaggagctgatgaatgtcaagctggccctggacgtggagatcgccacctaccgcaagctgctggagggtgaggagtgcaggctgaatggcgaaggcgttggacaagtcaacatctctgtggtgcagtccaccgtctccagtggctatggcggtgccagtggtgtcggcagtggcttaggcctgggtggaggaagcagctactcctatggcagtggtcttggcgttggaggtggcttcagttccagcagtggcagagccattgggggtggcctcagctctgttggaggcggcagttccaccatcaagtacaccaccacctcctcctccagcaggaagagctataagcactaaagtgcgtctgctagctctcggtcccacagtcctcaggcccctctctggctgcagagccctctcctcaggttgcctttcctctcctggcctccagtctcccctgctgtcccaggtagagctgggtatggatgcttagtgccctcacttcttctctctctctctataccatctgagcacccattgctcaccatcagatcaacctctgattttacatcatgatgtaatcaccactggagcttcactgttactaaattattaatttcttgcctccagtgttctatctctgaggctgagcattataagaaaatgacctctgctccttttcattgcagaaaattgccaggggcttatttcagaacaacttccacttactttccactggctctcaaactctctaacttataagtgttgtgaacccccacccaggcagtatccatgaaagcacaagtgactagtcctatgatgtacaaagcctgtatctctgtgatgatttctgtgctcttcgctgtttgcaattgctaaataaagcagatttataatacaataatatttcatacctttctagaaactgggtgtgatctcactgttggtaaagcccagcccttcccaacctgcaagctcaccttccaggactgggcccagcccatgctctccatatataagctgctgccccgagcctgattcctagtcctgcttctcttccctctctcctccagcctctcacactctcctcagctctctcatctcctggaaccatggccagcacatccaccaccatcaggagccacagcagcagccgccggggtttcagtgccaactcagccaggctccctggggtcagccgctctggcttcagcagcgtctccgtgtcccgctccaggggcagtggtggcctgggtggtgcatgtggaggagctggctttggcagccgcagtctgtatggcctggggggctccaagaggatctccattggagggggcagctgtgccatcagtggcggctatggcagcagagccggaggcagctatggctttggtggcgccgggagtggatttggtttcggtggtggagccggcattggctttggtctgggtggtggagccggccttgctggtggctttgggggccctggcttccctgtgtgcccccctggaggcatccaagaggtcaccgtcaaccagagtctcctgactcccctcaacctgcaaatcgatcccaccatccagcgggtgcgggctgaggagcgtgaacagatcaagaccctcaacaacaagtttgcctccttcatcgacaaggtgcggttcctggagcagcagaacaaggttctggaaacaaagtggaccctgctgcaggagcagggcaccaagactgtgaggcagaacctggagccgttgttcgagcagtacatcaacaacctcaggaggcagctggacagcattgtcggggaacggggccgcctggactcagagctcagaggcatgcaggacctggtggaggacttcaagaacaaatatgaggatgaaatcaacaagcgcacagcagcagagaatgaatttgtgactctgaagaaggatgtggatgctgcctacatgaacaaggttgaactgcaagccaaggcagacactctcacagacgagatcaacttcctgagagccttgtatgatgcagagctgtcccagatgcagacccacatctcagacacatctgtggtgctgtccatggacaacaaccgcaacctggacctggacagcatcatcgctgaggtcaaggcccaatatgaggagattgctcagagaagccgggctgaggctgagtcctggtaccagaccaagtacgaggagctgcaggtcacagcaggcagacatggggacgacctgcgcaacaccaagcaggagattgctgagatcaaccgcatgatccagaggctgagatctgagatcgaccacgtcaagaagcagtgcgccaacctgcaggccgccattgctgatgctgagcagcgtggggagatggccctcaaggatgccaagaacaagctggaagggctggaggatgccctgcagaaggccaagcaggacctggcccggctgctgaaggagtaccaggagctgatgaatgtcaagctggccctggacgtggagatcgccacctaccgcaagctgctggagggtgaggagtgcaggctgaatggcgaaggcgttggacaagtcaacatctctgtggtgcagtccaccgtctccagtggctatggcggtgccagtggtgtcggcagtggcttaggcctgggtggaggaagcagctactcctatggcagtggtcttggcgttggaggtggcttcagttccagcagtggcagagccattgggggtggcctcagctctgttggaggcggcagttccaccatcaagtacaccaccacctcctcctccagcaggaagagctataagcactaaagtgcgtctgctagctctcggtcccacagtcctcaggcccctctctggctgcagagccctctcctcaggttgcctttcctctcctggcctccagtctcccctgctgtcccaggtagagctgggtatggatgcttagtgccctcacttcttctctctctctctataccatctgagcacccattgctcaccatcagatcaacctctgattttacatcatgatgtaatcaccactggagcttcactgttactaaattattaatttcttgcctccagtgttctatctctgaggctgagcattataagaaaatgacctctgctccttttcattgcagaaaattgccaggggcttatttcagaacaacttccacttactttccactggctctcaaactctctaacttataagtgttgtgaacccccacccaggcagtatccatgaaagcacaagtgactagtcctatgatgtacaaagcctgtatctctgtgatgatttctgtgctcttcgctgtttgcaattgctaaataaagcagatttataatacaataatatttcatacctttctagaaactgggtgtgatctcactgttggtaaagcccagcccttcccaacctgcaagctcaccttccaggactgggcccagcccatgctctccatatataagctgctgccccgagcctgattcctagtcctgcttctcttccctctctcctccagcctctcacactctcctcagctctctcatctcctggaaccatggccagcacatccaccaccatcaggagccacagcagcagccgccggggtttcagtgccaactcagccaggctccctggggtcagccgctctggcttcagcagcgtctccgtgtcccgctccaggggcagtggtggcctgggtggtgcatgtggaggagctggctttggcagccgcagtctgtatggcctggggggctccaagaggatctccattggagggggcagctgtgccatcagtggcggctatggcagcagagccggaggcagctatggctttggtggcgccgggagtggatttggtttcggtggtggagccggcattggctttggtctgggtggtggagccggccttgctggtggctttgggggccctggcttccctgtgtgcccccctggaggcatccaagaggtcaccgtcaaccagagtctcctgactcccctcaacctgcaaatcgatcccaccatccagcgggtgcgggctgaggagcgtgaacagatcaagaccctcaacaacaagtttgcctccttcatcgacaaggtgcggttcctggagcagcagaacaaggttctggaaacaaagtggaccctgctgcaggagcagggcaccaagactgtgaggcagaacctggagccgttgttcgagcagtacatcaacaacctcaggaggcagctggacagcattgtcggggaacggggccgcctggactcagagctcagaggcatgcaggacctggtggaggacttcaagaacaaatatgaggatgaaatcaacaagcgcacagcagcagagaatgaatttgtgactctgaagaaggatgtggatgctgcctacatgaacaaggttgaactgcaagccaaggcagacactctcacagacgagatcaacttcctgagagccttgtatgatgcagagctgtcccagatgcagacccacatctcagacacatctgtggtgctgtccatggacaacaaccgcaacctggacctggacagcatcatcgctgaggtcaaggcccaatatgaggagattgctcagagaagccgggctgaggctgagtcctggtaccagaccaagtacgaggagctgcaggtcacagcaggcagacatggggacgacctgcgcaacaccaagcaggagattgctgagatcaaccgcatgatccagaggctgagatctgagatcgaccacgtcaagaagcagtgcgccaacctgcaggccgccattgctgatgctgagcagcgtggggagatggccctcaaggatgccaagaacaagctggaagggctggaggatgccctgcagaaggccaagcaggacctggcccggctgctgaaggagtaccaggagctgatgaatgtcaagctggccctggacgtggagatcgccacctaccgcaagctgctggagggtgaggagtgcaggctgaatggcgaaggcgttggacaagtcaacatctctgtggtgcagtccaccgtctccagtggctatggcggtgccagtggtgtcggcagtggcttaggcctgggtggaggaagcagctactcctatggcagtggtcttggcgttggaggtggcttcagttccagcagtggcagagccattgggggtggcctcagctctgttggaggcggcagttccaccatcaagtacaccaccacctcctcctccagcaggaagagctataagcactaaagtgcgtctgctagctctcggtcccacagtcctcaggcccctctctggctgcagagccctctcctcaggttgcctttcctctcctggcctccagtctcccctgctgtcccaggtagagctgggtatggatgcttagtgccctcacttcttctctctctctctataccatctgagcacccattgctcaccatcagatcaacctctgattttacatcatgatgtaatcaccactggagcttcactgttactaaattattaatttcttgcctccagtgttctatctctgaggctgagcattataagaaaatgacctctgctccttttcattgcagaaaattgccaggggcttatttcagaacaacttccacttactttccactggctctcaaactctctaacttataagtgttgtgaacccccacccaggcagtatccatgaaagcacaagtgactagtcctatgatgtacaaagcctgtatctctgtgatgatttctgtgctcttcgctgtttgcaattgctaaataaagcagatttataatacaataatatttcatacctttctagaaactgggtgtgatctcactgttggtaaagcccagcccttcccaacctgcaagctcaccttccaggactgggcccagcccatgctctccatatataagctgctgccccgagcctgattcctagtcctgcttctcttccctctctcctccagcctctcacactctcctcagctctctcatctcctggaaccatggccagcacatccaccaccatcaggagccacagcagcagccgccggggtttcagtgccaactcagccaggctccctggggtcagccgctctggcttcagcagcgtctccgtgtcccgctccaggggcagtggtggcctgggtggtgcatgtggaggagctggctttggcagccgcagtctgtatggcctggggggctccaagaggatctccattggagggggcagctgtgccatcagtggcggctatggcagcagagccggaggcagctatggctttggtggcgccgggagtggatttggtttcggtggtggagccggcattggctttggtctgggtggtggagccggccttgctggtggctttgggggccctggcttccctgtgtgcccccctggaggcatccaagaggtcaccgtcaaccagagtctcctgactcccctcaacctgcaaatcgatcccaccatccagcgggtgcgggctgaggagcgtgaacagatcaagaccctcaacaacaagtttgcctccttcatcgacaaggtgcggttcctggagcagcagaacaaggttctggaaacaaagtggaccctgctgcaggagcagggcaccaagactgtgaggcagaacctggagccgttgttcgagcagtacatcaacaacctcaggaggcagctggacagcattgtcggggaacggggccgcctggactcagagctcagaggcatgcaggacctggtggaggacttcaagaacaaatatgaggatgaaatcaacaagcgcacagcagcagagaatgaatttgtgactctgaagaaggatgtggatgctgcctacatgaacaaggttgaactgcaagccaaggcagacactctcacagacgagatcaacttcctgagagccttgtatgatgcagagctgtcccagatgcagacccacatctcagacacatctgtggtgctgtccatggacaacaaccgcaacctggacctggacagcatcatcgctgaggtcaaggcccaatatgaggagattgctcagagaagccgggctgaggctgagtcctggtaccagaccaagtacgaggagctgcaggtcacagcaggcagacatggggacgacctgcgcaacaccaagcaggagattgctgagatcaaccgcatgatccagaggctgagatctgagatcgaccacgtcaagaagcagtgcgccaacctgcaggccgccattgctgatgctgagcagcgtggggagatggccctcaaggatgccaagaacaagctggaagggctggaggatgccctgcagaaggccaagcaggacctggcccggctgctgaaggagtaccaggagctgatgaatgtcaagctggccctggacgtggagatcgccacctaccgcaagctgctggagggtgaggagtgcaggctgaatggcgaaggcgttggacaagtcaacatctctgtggtgcagtccaccgtctccagtggctatggcggtgccagtggtgtcggcagtggcttaggcctgggtggaggaagcagctactcctatggcagtggtcttggcgttggaggtggcttcagttccagcagtggcagagccattgggggtggcctcagctctgttggaggcggcagttccaccatcaagtacaccaccacctcctcctccagcaggaagagctataagcactaaagtgcgtctgctagctctcggtcccacagtcctcaggcccctctctggctgcagagccctctcctcaggttgcctttcctctcctggcctccagtctcccctgctgtcccaggtagagctgggtatggatgcttagtgccctcacttcttctctctctctctataccatctgagcacccattgctcaccatcagatcaacctctgattttacatcatgatgtaatcaccactggagcttcactgttactaaattattaatttcttgcctccagtgttctatctctgaggctgagcattataagaaaatgacctctgctccttttcattgcagaaaattgccaggggcttatttcagaacaacttccacttactttccactggctctcaaactctctaacttataagtgttgtgaacccccacccaggcagtatccatgaaagcacaagtgactagtcctatgatgtacaaagcctgtatctctgtgatgatttctgtgctcttcgctgtttgcaattgctaaataaagcagatttataatacaataatatttcatacctttctagaaactgggtgtgatctcactgttggtaaagcccagcccttcccaacctgcaagctcaccttccaggactgggcccagcccatgctctccatatataagctgctgccccgagcctgattcctagtcctgcttctcttccctctctcctccagcctctcacactctcctcagctctctcatctcctggaaccatggccagcacatccaccaccatcaggagccacagcagcagccgccggggtttcagtgccaactcagccaggctccctggggtcagccgctctggcttcagcagcgtctccgtgtcccgctccaggggcagtggtggcctgggtggtgcatgtggaggagctggctttggcagccgcagtctgtatggcctggggggctccaagaggatctccattggagggggcagctgtgccatcagtggcggctatggcagcagagccggaggcagctatggctttggtggcgccgggagtggatttggtttcggtggtggagccggcattggctttggtctgggtggtggagccggccttgctggtggctttgggggccctggcttccctgtgtgcccccctggaggcatccaagaggtcaccgtcaaccagagtctcctgactcccctcaacctgcaaatcgatcccaccatccagcgggtgcgggctgaggagcgtgaacagatcaagaccctcaacaacaagtttgcctccttcatcgacaaggtgcggttcctggagcagcagaacaaggttctggaaacaaagtggaccctgctgcaggagcagggcaccaagactgtgaggcagaacctggagccgttgttcgagcagtacatcaacaacctcaggaggcagctggacagcattgtcggggaacggggccgcctggactcagagctcagaggcatgcaggacctggtggaggacttcaagaacaaatatgaggatgaaatcaacaagcgcacagcagcagagaatgaatttgtgactctgaagaaggatgtggatgctgcctacatgaacaaggttgaactgcaagccaaggcagacactctcacagacgagatcaacttcctgagagccttgtatgatgcagagctgtcccagatgcagacccacatctcagacacatctgtggtgctgtccatggacaacaaccgcaacctggacctggacagcatcatcgctgaggtcaaggcccaatatgaggagattgctcagagaagccgggctgaggctgagtcctggtaccagaccaagtacgaggagctgcaggtcacagcaggcagacatggggacgacctgcgcaacaccaagcaggagattgctgagatcaaccgcatgatccagaggctgagatctgagatcgaccacgtcaagaagcagtgcgccaacctgcaggccgccattgctgatgctgagcagcgtggggagatggccctcaaggatgccaagaacaagctggaagggctggaggatgccctgcagaaggccaagcaggacctggcccggctgctgaaggagtaccaggagctgatgaatgtcaagctggccctggacgtggagatcgccacctaccgcaagctgctggagggtgaggagtgcaggctgaatggcgaaggcgttggacaagtcaacatctctgtggtgcagtccaccgtctccagtggctatggcggtgccagtggtgtcggcagtggcttaggcctgggtggaggaagcagctactcctatggcagtggtcttggcgttggaggtggcttcagttccagcagtggcagagccattgggggtggcctcagctctgttggaggcggcagttccaccatcaagtacaccaccacctcctcctccagcaggaagagctataagcactaaagtgcgtctgctagctctcggtcccacagtcctcaggcccctctctggctgcagagccctctcctcaggttgcctttcctctcctggcctccagtctcccctgctgtcccaggtagagctgggtatggatgcttagtgccctcacttcttctctctctctctataccatctgagcacccattgctcaccatcagatcaacctctgattttacatcatgatgtaatcaccactggagcttcactgttactaaattattaatttcttgcctccagtgttctatctctgaggctgagcattataagaaaatgacctctgctccttttcattgcagaaaattgccaggggcttatttcagaacaacttccacttactttccactggctctcaaactctctaacttataagtgttgtgaacccccacccaggcagtatccatgaaagcacaagtgactagtcctatgatgtacaaagcctgtatctctgtgatgatttctgtgctcttcgctgtttgcaattgctaaataaagcagatttataatacaata

SEQ ID NO: 1027 - DNA, 5469 bp, Homo sapiens
  misc_feature (720)..(720): second gene starts at position 720
atggcttttccgccgcggcgacggctgcgcctcggtccccgcggcctcccgcttcttctctcgggactcctgctacctctgtgccgcgccttcaacctagacgtggacagtcctgccgagtactctggccccgagggaagttacttcggcttcgccgtggatttcttcgtgcccagcgcgtcttcccggatgtttcttctcgtgggagctcccaaagcaaacaccacccagcctgggattgtggaaggagggcaggtcctcaaatgtgactggtcttctacccgccggtgccagccaattgaatttgatgcaacaggcaatagagattatgccaaggatgatccattggaatttaagtcccatcagtggtttggagcatctgtgaggtcgaaacaggataaaattttggcctgtgccccattgtaccattggagaactgagatgaaacaggagcgagagcctgttggaacatgctttcttcaagatggaacaaagactgttgagtatgctccatgtagatcacaagatattgatgctgatggacagggattttgtcaaggaggattcagcattgattttactaaagctgacagagtacttcttggtggtcctggtagcttttattggcaaggtcagcttatttcggatcaagtggcagaaatcgtatctaaatacgaccccaatgtttacagcatcaagtataataaccaattagcaactcggactgcacaagctatttttgatgacagctatttgggttattctgtggctgtcggagatttcaatggtgatggcatagatgactttgtttcaggagttccaagagcagcaaggactttgggaatggtttatatttatgatgggaagaacatgtcctccttatacaattttactggcgagcagatggctgcatatttcggattttctgtagctgccactgacattaatggagatgattatgcagatgtgtttattggagcacctctcttcatggatcgtggctctgatggcaaactccaagaggtggggcaggtctcagtgtctctacagagagcttcaggagacttccagacgacaaagctgaatggatttgaggtctttgcacggtttggcagtgccatagctcctttgggagatctggaccaggatggtttcaatgatattgcaattgctgctccatatgggggtgaagataaaaaaggaattgtttatatcttcaatggaagatcaacaggcttgaacgcagtcccatctcaaatccttgaagggcagtgggctgctcgaagcatgccaccaagctttggctattcaatgaaaggagccacagatatagacaaaaatggatatccagacttaattgtaggagcttttggtgtagatcgagctatcttatacagggccagaccagttatcactgtaaatgctggtcttgaagtgtaccctagcattttaaatcaagacaataaaacctgctcactgcctggaacagctctcaaagtttcctgttttaatgttaggttctgcttaaaggcagatggcaaaggagtacttcccaggaaacttaatttccaggtggaacttcttttggataaactcaagcaaaagggagcaattcgacgagcactgtttctctacagcaggtccccaagtcactccaagaacatgactatttcaagggggggactgatgcagtgtgaggaattgatagcgtatctgcggtcaagagaagagagcagaaagcaggctcttgctgctaaaagagaaaaaagaaaagaaaagagaaaaaagaaaaaagaggaacagaaaaggaaacaggaagaagatgaagaaaacaaacctaaggagaattcggaactaccagaggatgaagatgaagaggagaatgatgaagatgtggagcaagaagttcccatagaacctcctagtgcaaccaccaccactacgattggaatctctgcaacatctgcaacattcacaaatgtgtttgggaaaaaaagggccaatgtggtgacaactcccagcaccaatcggaaaaataagaagaacaaaacaaaagaaacccctcctacagcacatttaattttaccagaacaacatatgtctttagcccaacaaaaggcagataaaaataaaataaatggagaacctagaggtggtggtgcaggtgggaatagtgattcagataacttggacagcacagactgcaacagtgagagtagcagtggtggtaaaagccaagagttaaattttgtgatggatgtgaattcctctaaatacccctcactgctccttcattcccaagaagaaaagacaagtactgctacttccaaaactcagacacgacttgaaggtgaagtgactcctaattccttgtcaaccagctacaagacagtgtcattgccattaagctctccaaacataaagctgaatctcactagccctaaaaggggtcagaaaagagaagaagggtggaaagaagttgtacgaaggtcaaagaaattgtctgttccagcctcagtggtgtcgaggataatgggaagaggaggatgcaacatcactgcaatacaggatgttactggtgcccatattgatgtggataaacaaaaagataagaatggcgagagaatgatcacaataaggggtggcacagaatcaacaagatatgcagttcaactaatcaatgcactcattcaagatcctgctaaggaactggaagacttgattcctaaaaatcatatcagaacacctgccagcaccaaatcaattcatgctaacttctcatctggagtaggtaccacagcagcttccagtaaaaatgcatttcctttgggtgctccaactcttgtaacttcacaggcaacaacgttatctacgttccagcccgctaataaacttaataagaatgttccaacaaatgtacgttcttctttcccagtttctctacccttagcttatcctcaccctcattttgccctgctggctgctcaaactatgcaacagattcggcatcctcgcttacccatggcccagtttggaggaaccttctcaccttctcctaacacatggggaccattcccagtgagacctgtgaatcctggcaacacaaatagctctccaaagcataataacacaagccgtctacctaaccagaacgggactgttttaccctcagagtctgctggactagctactgccagttgtcctatcactgtctcttctgtagttgctgccagtcagcaactgtgtgtcactaatacccggactccttcatcagtcagaaagcagttgtttgcctgtgtgcctaagacaagtcctccagcaacagtgatttcttctgtgacaagcacttgtagttccctgccttctgtctcctctgcacctatcactagcgggcaagctcccaccacatttctacctgcaagtacttctcaagcacagctttcttcacaaaagatggagtctttctctgctgtgccacccaccaaagagaaagtgtccacacaggaccagcccatggcaaacctatgtaccccatcttcaactgcaaacagttgcagtagctctgccagcaacaccccgggagctccagaaactcacccatccagtagtcccactcctacttccagtaacacacaagaggaggcacagccatccagtgtgtctgatttaagtcctatgtcaatgccttttgcatctaactcagaacctgctccattgactttgacatcacccagaatggttgctgctgataatcaggacaccagtaatttacctcagttagctgtaccagcacctcgagtttctcatcgaatgcagcccagaggttctttttactccatggtaccaaatgcaactattcaccaggatccccagtctatttttgttacgaatccagttactttaacaccacctcaaggcccaccagctgcagtgcagctttcttcagctgtgaacattatgaatggttctcagatgcacataaacccagcaaataagtctttgccacctacatttggcccagccacacttttcaatcacttcagcagtctttttgatagtagtcaggtgccagctaaccagggctggggagatggtccactgtcctcacgagttgctacagatgcctctttcactgttcagtcagcgttcctgggtaactcagtgcttggacacttggaaaacatgcaccctgataactcaaaggcacctggcttcagaccaccttcccagcgagtttctactagtccagttgggttaccatccattgacccatcaggcagctccccatcttcctcttctgctcctctggcaagtttttccggcataccaggaacaagggttttcctgcaagggccagctcctgttgggactcctagtttcaacagacaacatttttctccccatccttggacaagcgcctcaaactcatccacttctgccccaccaacgttgggccaaccaaaaggagtcagtgccagtcaagatcgaaagatacctcccccaattggaacagagagactggcccgaattcggcaaggagggtctgttgcacaagccccggcggggaccagttttgtcgctcccgttggacacagtggaatctggtcatttggtgtcaatgctgtgtcagaaggcttatcaggttggtcgcaatctgtgatggggaaccatccaatgcatcaacaattatcagacccaagcacattctcccaacatcagccaatggagagagatgattctggaatggtagccccctctaacatttttcatcagcctatggcaagtggttttgtggatttttctaaaggtctgccaatttccatgtatggaggcaccataataccctctcatcctcagcttgctgatgttccaggaggccctctgtttaatggacttcacaatccagatcctgcttggaaccctatgataaaagttatccaaaattcaactgaatgcactgatgcccagcagatttggcctggcacgtgggcacctcatattggaaacatgcatctcaaatatgtcaactaagttagaaggtctttactctttagccttgtttaagaaacctatgaccttggaagaaccatggggatttttttttaatgtgcctaagaaattttctctgaggctttagcaatggaaatttgattgcccattgtataagaacaaattgatttcctatccacctgattatgttctctggttagtttagccattttgaacttaagatcatatgaccttagtgcttttggctaaacatacagaatactacttgtatgcagaagagaattagttgattacatgtttcaaccttttagggtgataaatacatgtataattgtttacatacttaaaaggaaaaagttgagtaaatttcttgtcatatagtggctctacgtaatgtagcctgtattaatgtgaaatatttaccagaatattcaataaaaagatgaacagtctttagaa

SEQ ID NO: 1028 - DNA, 5361 bp, Homo sapiens
  misc_feature (612)..(612): second gene starts at position 612
atggcttttccgccgcggcgacggctgcgcctcggtccccgcggcctcccgcttcttctctcgggactcctgctacctctgtgccgcgccttcaacctagacgtggacagtcctgccgagtactctggccccgagggaagttacttcggcttcgccgtggatttcttcgtgcccagcgcgtcttcccggatgtttcttctcgtgggagctcccaaagcaaacaccacccagcctgggattgtggaaggagggcaggtcctcaaatgtgactggtcttctacccgccggtgccagccaattgaatttgatgcaacaggcaatagagattatgccaaggatgatccattggaatttaagtcccatcagtggtttggagcatctgtgaggtcgaaacaggataaaattttggcctgtgccccattgtaccattggagaactgagatgaaacaggagcgagagcctgttggaacatgctttcttcaagatggaacaaagactgttgagtatgctccatgtagatcacgtcagcttatttcggatcaagtggcagaaatcgtatctaaatacgaccccaatgtttacagcatcaagtataataaccaattagcaactcggactgcacaagctatttttgatgacagctatttgggttattctgtggctgtcggagatttcaatggtgatggcatagatgactttgtttcaggagttccaagagcagcaaggactttgggaatggtttatatttatgatgggaagaacatgtcctccttatacaattttactggcgagcagatggctgcatatttcggattttctgtagctgccactgacattaatggagatgattatgcagatgtgtttattggagcacctctcttcatggatcgtggctctgatggcaaactccaagaggtggggcaggtctcagtgtctctacagagagcttcaggagacttccagacgacaaagctgaatggatttgaggtctttgcacggtttggcagtgccatagctcctttgggagatctggaccaggatggtttcaatgatattgcaattgctgctccatatgggggtgaagataaaaaaggaattgtttatatcttcaatggaagatcaacaggcttgaacgcagtcccatctcaaatccttgaagggcagtgggctgctcgaagcatgccaccaagctttggctattcaatgaaaggagccacagatatagacaaaaatggatatccagacttaattgtaggagcttttggtgtagatcgagctatcttatacagggccagaccagttatcactgtaaatgctggtcttgaagtgtaccctagcattttaaatcaagacaataaaacctgctcactgcctggaacagctctcaaagtttcctgttttaatgttaggttctgcttaaaggcagatggcaaaggagtacttcccaggaaacttaatttccaggtggaacttcttttggataaactcaagcaaaagggagcaattcgacgagcactgtttctctacagcaggtccccaagtcactccaagaacatgactatttcaagggggggactgatgcagtgtgaggaattgatagcgtatctgcggtcaagagaagagagcagaaagcaggctcttgctgctaaaagagaaaaaagaaaagaaaagagaaaaaagaaaaaagaggaacagaaaaggaaacaggaagaagatgaagaaaacaaacctaaggagaattcggaactaccagaggatgaagatgaagaggagaatgatgaagatgtggagcaagaagttcccatagaacctcctagtgcaaccaccaccactacgattggaatctctgcaacatctgcaacattcacaaatgtgtttgggaaaaaaagggccaatgtggtgacaactcccagcaccaatcggaaaaataagaagaacaaaacaaaagaaacccctcctacagcacatttaattttaccagaacaacatatgtctttagcccaacaaaaggcagataaaaataaaataaatggagaacctagaggtggtggtgcaggtgggaatagtgattcagataacttggacagcacagactgcaacagtgagagtagcagtggtggtaaaagccaagagttaaattttgtgatggatgtgaattcctctaaatacccctcactgctccttcattcccaagaagaaaagacaagtactgctacttccaaaactcagacacgacttgaaggtgaagtgactcctaattccttgtcaaccagctacaagacagtgtcattgccattaagctctccaaacataaagctgaatctcactagccctaaaaggggtcagaaaagagaagaagggtggaaagaagttgtacgaaggtcaaagaaattgtctgttccagcctcagtggtgtcgaggataatgggaagaggaggatgcaacatcactgcaatacaggatgttactggtgcccatattgatgtggataaacaaaaagataagaatggcgagagaatgatcacaataaggggtggcacagaatcaacaagatatgcagttcaactaatcaatgcactcattcaagatcctgctaaggaactggaagacttgattcctaaaaatcatatcagaacacctgccagcaccaaatcaattcatgctaacttctcatctggagtaggtaccacagcagcttccagtaaaaatgcatttcctttgggtgctccaactcttgtaacttcacaggcaacaacgttatctacgttccagcccgctaataaacttaataagaatgttccaacaaatgtacgttcttctttcccagtttctctacccttagcttatcctcaccctcattttgccctgctggctgctcaaactatgcaacagattcggcatcctcgcttacccatggcccagtttggaggaaccttctcaccttctcctaacacatggggaccattcccagtgagacctgtgaatcctggcaacacaaatagctctccaaagcataataacacaagccgtctacctaaccagaacgggactgttttaccctcagagtctgctggactagctactgccagttgtcctatcactgtctcttctgtagttgctgccagtcagcaactgtgtgtcactaatacccggactccttcatcagtcagaaagcagttgtttgcctgtgtgcctaagacaagtcctccagcaacagtgatttcttctgtgacaagcacttgtagttccctgccttctgtctcctctgcacctatcactagcgggcaagctcccaccacatttctacctgcaagtacttctcaagcacagctttcttcacaaaagatggagtctttctctgctgtgccacccaccaaagagaaagtgtccacacaggaccagcccatggcaaacctatgtaccccatcttcaactgcaaacagttgcagtagctctgccagcaacaccccgggagctccagaaactcacccatccagtagtcccactcctacttccagtaacacacaagaggaggcacagccatccagtgtgtctgatttaagtcctatgtcaatgccttttgcatctaactcagaacctgctccattgactttgacatcacccagaatggttgctgctgataatcaggacaccagtaatttacctcagttagctgtaccagcacctcgagtttctcatcgaatgcagcccagaggttctttttactccatggtaccaaatgcaactattcaccaggatccccagtctatttttgttacgaatccagttactttaacaccacctcaaggcccaccagctgcagtgcagctttcttcagctgtgaacattatgaatggttctcagatgcacataaacccagcaaataagtctttgccacctacatttggcccagccacacttttcaatcacttcagcagtctttttgatagtagtcaggtgccagctaaccagggctggggagatggtccactgtcctcacgagttgctacagatgcctctttcactgttcagtcagcgttcctgggtaactcagtgcttggacacttggaaaacatgcaccctgataactcaaaggcacctggcttcagaccaccttcccagcgagtttctactagtccagttgggttaccatccattgacccatcaggcagctccccatcttcctcttctgctcctctggcaagtttttccggcataccaggaacaagggttttcctgcaagggccagctcctgttgggactcctagtttcaacagacaacatttttctccccatccttggacaagcgcctcaaactcatccacttctgccccaccaacgttgggccaaccaaaaggagtcagtgccagtcaagatcgaaagatacctcccccaattggaacagagagactggcccgaattcggcaaggagggtctgttgcacaagccccggcggggaccagttttgtcgctcccgttggacacagtggaatctggtcatttggtgtcaatgctgtgtcagaaggcttatcaggttggtcgcaatctgtgatggggaaccatccaatgcatcaacaattatcagacccaagcacattctcccaacatcagccaatggagagagatgattctggaatggtagccccctctaacatttttcatcagcctatggcaagtggttttgtggatttttctaaaggtctgccaatttccatgtatggaggcaccataataccctctcatcctcagcttgctgatgttccaggaggccctctgtttaatggacttcacaatccagatcctgcttggaaccctatgataaaagttatccaaaattcaactgaatgcactgatgcccagcagatttggcctggcacgtgggcacctcatattggaaacatgcatctcaaatatgtcaactaagttagaaggtctttactctttagccttgtttaagaaacctatgaccttggaagaaccatggggatttttttttaatgtgcctaagaaattttctctgaggctttagcaatggaaatttgattgcccattgtataagaacaaattgatttcctatccacctgattatgttctctggttagtttagccattttgaacttaagatcatatgaccttagtgcttttggctaaacatacagaatactacttgtatgcagaagagaattagttgattacatgtttcaaccttttagggtgataaatacatgtataattgtttacatacttaaaaggaaaaagttgagtaaatttcttgtcatatagtggctctacgtaatgtagcctgtattaatgtgaaatatttaccagaatattcaataaaaagatgaacagtctttagaa

SEQ ID NO: 1029 - DNA, 5331 bp, Homo sapiens
  misc_feature (582)..(582): second gene starts at position 582
atgctcctaggcaccctccttctgatcctgtacatcttaatgttgtgccggatgtttcttctcgtgggagctcccaaagcaaacaccacccagcctgggattgtggaaggagggcaggtcctcaaatgtgactggtcttctacccgccggtgccagccaattgaatttgatgcaacaggcaatagagattatgccaaggatgatccattggaatttaagtcccatcagtggtttggagcatctgtgaggtcgaaacaggataaaattttggcctgtgccccattgtaccattggagaactgagatgaaacaggagcgagagcctgttggaacatgctttcttcaagatggaacaaagactgttgagtatgctccatgtagatcacaagatattgatgctgatggacagggattttgtcaaggaggattcagcattgattttactaaagctgacagagtacttcttggtggtcctggtagcttttattggcaaggtcagcttatttcggatcaagtggcagaaatcgtatctaaatacgaccccaatgtttacagcatcaagtataataaccaattagcaactcggactgcacaagctatttttgatgacagctatttgggttattctgtggctgtcggagatttcaatggtgatggcatagatgactttgtttcaggagttccaagagcagcaaggactttgggaatggtttatatttatgatgggaagaacatgtcctccttatacaattttactggcgagcagatggctgcatatttcggattttctgtagctgccactgacattaatggagatgattatgcagatgtgtttattggagcacctctcttcatggatcgtggctctgatggcaaactccaagaggtggggcaggtctcagtgtctctacagagagcttcaggagacttccagacgacaaagctgaatggatttgaggtctttgcacggtttggcagtgccatagctcctttgggagatctggaccaggatggtttcaatgatattgcaattgctgctccatatgggggtgaagataaaaaaggaattgtttatatcttcaatggaagatcaacaggcttgaacgcagtcccatctcaaatccttgaagggcagtgggctgctcgaagcatgccaccaagctttggctattcaatgaaaggagccacagatatagacaaaaatggatatccagacttaattgtaggagcttttggtgtagatcgagctatcttatacagggccagaccagttatcactgtaaatgctggtcttgaagtgtaccctagcattttaaatcaagacaataaaacctgctcactgcctggaacagctctcaaagtttcctgttttaatgttaggttctgcttaaaggcagatggcaaaggagtacttcccaggaaacttaatttccaggtggaacttcttttggataaactcaagcaaaagggagcaattcgacgagcactgtttctctacagcaggtccccaagtcactccaagaacatgactatttcaagggggggactgatgcagtgtgaggaattgatagcgtatctgcggtcaagagaagagagcagaaagcaggctcttgctgctaaaagagaaaaaagaaaagaaaagagaaaaaagaaaaaagaggaacagaaaaggaaacaggaagaagatgaagaaaacaaacctaaggagaattcggaactaccagaggatgaagatgaagaggagaatgatgaagatgtggagcaagaagttcccatagaacctcctagtgcaaccaccaccactacgattggaatctctgcaacatctgcaacattcacaaatgtgtttgggaaaaaaagggccaatgtggtgacaactcccagcaccaatcggaaaaataagaagaacaaaacaaaagaaacccctcctacagcacatttaattttaccagaacaacatatgtctttagcccaacaaaaggcagataaaaataaaataaatggagaacctagaggtggtggtgcaggtgggaatagtgattcagataacttggacagcacagactgcaacagtgagagtagcagtggtggtaaaagccaagagttaaattttgtgatggatgtgaattcctctaaatacccctcactgctccttcattcccaagaagaaaagacaagtactgctacttccaaaactcagacacgacttgaaggtgaagtgactcctaattccttgtcaaccagctacaagacagtgtcattgccattaagctctccaaacataaagctgaatctcactagccctaaaaggggtcagaaaagagaagaagggtggaaagaagttgtacgaaggtcaaagaaattgtctgttccagcctcagtggtgtcgaggataatgggaagaggaggatgcaacatcactgcaatacaggatgttactggtgcccatattgatgtggataaacaaaaagataagaatggcgagagaatgatcacaataaggggtggcacagaatcaacaagatatgcagttcaactaatcaatgcactcattcaagatcctgctaaggaactggaagacttgattcctaaaaatcatatcagaacacctgccagcaccaaatcaattcatgctaacttctcatctggagtaggtaccacagcagcttccagtaaaaatgcatttcctttgggtgctccaactcttgtaacttcacaggcaacaacgttatctacgttccagcccgctaataaacttaataagaatgttccaacaaatgtacgttcttctttcccagtttctctacccttagcttatcctcaccctcattttgccctgctggctgctcaaactatgcaacagattcggcatcctcgcttacccatggcccagtttggaggaaccttctcaccttctcctaacacatggggaccattcccagtgagacctgtgaatcctggcaacacaaatagctctccaaagcataataacacaagccgtctacctaaccagaacgggactgttttaccctcagagtctgctggactagctactgccagttgtcctatcactgtctcttctgtagttgctgccagtcagcaactgtgtgtcactaatacccggactccttcatcagtcagaaagcagttgtttgcctgtgtgcctaagacaagtcctccagcaacagtgatttcttctgtgacaagcacttgtagttccctgccttctgtctcctctgcacctatcactagcgggcaagctcccaccacatttctacctgcaagtacttctcaagcacagctttcttcacaaaagatggagtctttctctgctgtgccacccaccaaagagaaagtgtccacacaggaccagcccatggcaaacctatgtaccccatcttcaactgcaaacagttgcagtagctctgccagcaacaccccgggagctccagaaactcacccatccagtagtcccactcctacttccagtaacacacaagaggaggcacagccatccagtgtgtctgatttaagtcctatgtcaatgccttttgcatctaactcagaacctgctccattgactttgacatcacccagaatggttgctgctgataatcaggacaccagtaatttacctcagttagctgtaccagcacctcgagtttctcatcgaatgcagcccagaggttctttttactccatggtaccaaatgcaactattcaccaggatccccagtctatttttgttacgaatccagttactttaacaccacctcaaggcccaccagctgcagtgcagctttcttcagctgtgaacattatgaatggttctcagatgcacataaacccagcaaataagtctttgccacctacatttggcccagccacacttttcaatcacttcagcagtctttttgatagtagtcaggtgccagctaaccagggctggggagatggtccactgtcctcacgagttgctacagatgcctctttcactgttcagtcagcgttcctgggtaactcagtgcttggacacttggaaaacatgcaccctgataactcaaaggcacctggcttcagaccaccttcccagcgagtttctactagtccagttgggttaccatccattgacccatcaggcagctccccatcttcctcttctgctcctctggcaagtttttccggcataccaggaacaagggttttcctgcaagggccagctcctgttgggactcctagtttcaacagacaacatttttctccccatccttggacaagcgcctcaaactcatccacttctgccccaccaacgttgggccaaccaaaaggagtcagtgccagtcaagatcgaaagatacctcccccaattggaacagagagactggcccgaattcggcaaggagggtctgttgcacaagccccggcggggaccagttttgtcgctcccgttggacacagtggaatctggtcatttggtgtcaatgctgtgtcagaaggcttatcaggttggtcgcaatctgtgatggggaaccatccaatgcatcaacaattatcagacccaagcacattctcccaacatcagccaatggagagagatgattctggaatggtagccccctctaacatttttcatcagcctatggcaagtggttttgtggatttttctaaaggtctgccaatttccatgtatggaggcaccataataccctctcatcctcagcttgctgatgttccaggaggccctctgtttaatggacttcacaatccagatcctgcttggaaccctatgataaaagttatccaaaattcaactgaatgcactgatgcccagcagatttggcctggcacgtgggcacctcatattggaaacatgcatctcaaatatgtcaactaagttagaaggtctttactctttagccttgtttaagaaacctatgaccttggaagaaccatggggatttttttttaatgtgcctaagaaattttctctgaggctttagcaatggaaatttgattgcccattgtataagaacaaattgatttcctatccacctgattatgttctctggttagtttagccattttgaacttaagatcatatgaccttagtgcttttggctaaacatacagaatactacttgtatgcagaagagaattagttgattacatgtttcaaccttttagggtgataaatacatgtataattgtttacatacttaaaaggaaaaagttgagtaaatttcttgtcatatagtggctctacgtaatgtagcctgtattaatgtgaaatatttaccagaatattcaataaaaagatgaacagtctttagaa

SEQ ID NO: 1030 - DNA, 8960 bp, Homo sapiens
  misc_feature (22)..(22): second gene starts at position 22
agcagcgggggcggccccgggcgtgactacagccagtactacaggacaattgaggagctgcagaacaagatcctcacagccaccgtggacaatgccaacatcctgctacagattgacaatgcccgtctggctgctgatgacttccgcaccaagtttgagacagagcaggccctgcgcctgagtgtggaggccgacatcaatggcctgcgcagggtgctggatgagctgaccctggccagagccgacctggagatgcagattgagaacctcaaggaggagctggcctacctgaagaagaaccacgaggaggagatgaacgccctgcgaggccaggtgggtggtgagatcaatgtggagatggacgctgccccaggcgtggacctgagccgcatcctcaacgagatgcgtgaccagtatgagaagatggcagagaagaaccgcaaggatgccgaggattggttcttcagcaagacagaggaactgaaccgcgaggtggccaccaacagtgagctggtgcagagtggcaagagtgagatctcggagctccggcgcaccatgcaggccttggagatagagctgcagtcccagctcagcatgaaagcatccctggagggcaacctggcggagacagagaaccgctactgcgtgcagctgtcccagatccaggggctgattggcagcgtggaggagcagctggcccagcttcgctgcgagatggagcagcagaaccaggaatacaaaatcctgctggatgtgaagacgcggctggagcaggagattgccacctaccgccgcctgctggagggagaggatgcccacctgactcagtacaagaaagaaccggtgaccacccgtcaggtgcgtaccattgtggaagaggtccaggatggcaaggtcatctcctcccgcgagcaggtccaccagaccacccgctgaggactcagctaccccggccggccacccaggaggcagggaggcagccgccccatctgccccacagtctccggcctctccagcctcagccccctgcttcagtcccttccccatgcttccttgcctgatgacaataaagcttgttgactcagctatgatcgctacgcccacttggtggcctataaaggaagcgggcgaaccccggcagccctacacaacttggggcccctctcctctccagcccttctcctgtgtgcctgcctcctgccgccgccaccatgaccacctccatccgccagttcacctcctccagctccatcaagggctcctccggcctggggggcggctcgtcccgcacctcctgccggctgtctggcggcctgggtgccggctcctgcaggctgggatctgctggcggcctgggcagcaccctcgggggtagcagctactccagctgctacagctttggctctggtggtggctatggcagcagctttgggggtgttgatgggctgctggctggaggtgagaaggccaccatgcagaacctcaatgaccgcctggcctcctacctggacaaggtgcgtgccctggaggaggccaacactgagctggaggtgaagatccgtgactggtaccagaggcaggccccggggcccgcccgtgactacagccagtactacaggacaattgaggagctgcagaacaagatcctcacagccaccgtggacaatgccaacatcctgctacagattgacaatgcccgtctggctgctgatgacttccgcaccaagtttgagacagagcaggccctgcgcctgagtgtggaggccgacatcaatggcctgcgcagggtgctggatgagctgaccctggccagagccgacctggagatgcagattgagaacctcaaggaggagctggcctacctgaagaagaaccacgaggaggagatgaacgccctgcgaggccaggtgggtggtgagatcaatgtggagatggacgctgccccaggcgtggacctgagccgcatcctcaacgagatgcgtgaccagtatgagaagatggcagagaagaaccgcaaggatgccgaggattggttcttcagcaagacagaggaactgaaccgcgaggtggccaccaacagtgagctggtgcagagtggcaagagtgagatctcggagctccggcgcaccatgcaggccttggagatagagctgcagtcccagctcagcatgaaagcatccctggagggcaacctggcggagacagagaaccgctactgcgtgcagctgtcccagatccaggggctgattggcagcgtggaggagcagctggcccagcttcgctgcgagatggagcagcagaaccaggaatacaaaatcctgctggatgtgaagacgcggctggagcaggagattgccacctaccgccgcctgctggagggagaggatgcccacctgactcagtacaagaaagaaccggtgaccacccgtcaggtgcgtaccattgtggaagaggtccaggatggcaaggtcatctcctcccgcgagcaggtccaccagaccacccgctgaggactcagctaccccggccggccacccaggaggcagggaggcagccgccccatctgccccacagtctccggcctctccagcctcagccccctgcttcagtcccttccccatgcttccttgcctgatgacaataaagcttgttgactcagctatgatcgctacgcccacttggtggcctataaaggaagcgggcgaaccccggcagccctacacaacttggggcccctctcctctccagcccttctcctgtgtgcctgcctcctgccgccgccaccatgaccacctccatccgccagttcacctcctccagctccatcaagggctcctccggcctggggggcggctcgtcccgcacctcctgccggctgtctggcggcctgggtgccggctcctgcaggctgggatctgctggcggcctgggcagcaccctcgggggtagcagctactccagctgctacagctttggctctggtggtggctatggcagcagctttgggggtgttgatgggctgctggctggaggtgagaaggccaccatgcagaacctcaatgaccgcctggcctcctacctggacaaggtgcgtgccctggaggaggccaacactgagctggaggtgaagatccgtgactggtaccagaggcaggccccggggcccgcccgtgactacagccagtactacaggacaattgaggagctgcagaacaagatcctcacagccaccgtggacaatgccaacatcctgctacagattgacaatgcccgtctggctgctgatgacttccgcaccaagtttgagacagagcaggccctgcgcctgagtgtggaggccgacatcaatggcctgcgcagggtgctggatgagctgaccctggccagagccgacctggagatgcagattgagaacctcaaggaggagctggcctacctgaagaagaaccacgaggaggagatgaacgccctgcgaggccaggtgggtggtgagatcaatgtggagatggacgctgccccaggcgtggacctgagccgcatcctcaacgagatgcgtgaccagtatgagaagatggcagagaagaaccgcaaggatgccgaggattggttcttcagcaagacagaggaactgaaccgcgaggtggccaccaacagtgagctggtgcagagtggcaagagtgagatctcggagctccggcgcaccatgcaggccttggagatagagctgcagtcccagctcagcatgaaagcatccctggagggcaacctggcggagacagagaaccgctactgcgtgcagctgtcccagatccaggggctgattggcagcgtggaggagcagctggcccagcttcgctgcgagatggagcagcagaaccaggaatacaaaatcctgctggatgtgaagacgcggctggagcaggagattgccacctaccgccgcctgctggagggagaggatgcccacctgactcagtacaagaaagaaccggtgaccacccgtcaggtgcgtaccattgtggaagaggtccaggatggcaaggtcatctcctcccgcgagcaggtccaccagaccacccgctgaggactcagctaccccggccggccacccaggaggcagggaggcagccgccccatctgccccacagtctccggcctctccagcctcagccccctgcttcagtcccttccccatgcttccttgcctgatgacaataaagcttgttgactcagctatgatcgctacgcccacttggtggcctataaaggaagcgggcgaaccccggcagccctacacaacttggggcccctctcctctccagcccttctcctgtgtgcctgcctcctgccgccgccaccatgaccacctccatccgccagttcacctcctccagctccatcaagggctcctccggcctggggggcggctcgtcccgcacctcctgccggctgtctggcggcctgggtgccggctcctgcaggctgggatctgctggcggcctgggcagcaccctcgggggtagcagctactccagctgctacagctttggctctggtggtggctatggcagcagctttgggggtgttgatgggctgctggctggaggtgagaaggccaccatgcagaacctcaatgaccgcctggcctcctacctggacaaggtgcgtgccctggaggaggccaacactgagctggaggtgaagatccgtgactggtaccagaggcaggccccggggcccgcccgtgactacagccagtactacaggacaattgaggagctgcagaacaagatcctcacagccaccgtggacaatgccaacatcctgctacagattgacaatgcccgtctggctgctgatgacttccgcaccaagtttgagacagagcaggccctgcgcctgagtgtggaggccgacatcaatggcctgcgcagggtgctggatgagctgaccctggccagagccgacctggagatgcagattgagaacctcaaggaggagctggcctacctgaagaagaaccacgaggaggagatgaacgccctgcgaggccaggtgggtggtgagatcaatgtggagatggacgctgccccaggcgtggacctgagccgcatcctcaacgagatgcgtgaccagtatgagaagatggcagagaagaaccgcaaggatgccgaggattggttcttcagcaagacagaggaactgaaccgcgaggtggccaccaacagtgagctggtgcagagtggcaagagtgagatctcggagctccggcgcaccatgcaggccttggagatagagctgcagtcccagctcagcatgaaagcatccctggagggcaacctggcggagacagagaaccgctactgcgtgcagctgtcccagatccaggggctgattggcagcgtggaggagcagctggcccagcttcgctgcgagatggagcagcagaaccaggaatacaaaatcctgctggatgtgaagacgcggctggagcaggagattgccacctaccgccgcctgctggagggagaggatgcccacctgactcagtacaagaaagaaccggtgaccacccgtcaggtgcgtaccattgtggaagaggtccaggatggcaaggtcatctcctcccgcgagcaggtccaccagaccacccgctgaggactcagctaccccggccggccacccaggaggcagggaggcagccgccccatctgccccacagtctccggcctctccagcctcagccccctgcttcagtcccttccccatgcttccttgcctgatgacaataaagcttgttgactcagctatgatcgctacgcccacttggtggcctataaaggaagcgggcgaaccccggcagccctacacaacttggggcccctctcctctccagcccttctcctgtgtgcctgcctcctgccgccgccaccatgaccacctccatccgccagttcacctcctccagctccatcaagggctcctccggcctggggggcggctcgtcccgcacctcctgccggctgtctggcggcctgggtgccggctcctgcaggctgggatctgctggcggcctgggcagcaccctcgggggtagcagctactccagctgctacagctttggctctggtggtggctatggcagcagctttgggggtgttgatgggctgctggctggaggtgagaaggccaccatgcagaacctcaatgaccgcctggcctcctacctggacaaggtgcgtgccctggaggaggccaacactgagctggaggtgaagatccgtgactggtaccagaggcaggccccggggcccgcccgtgactacagccagtactacaggacaattgaggagctgcagaacaagatcctcacagccaccgtggacaatgccaacatcctgctacagattgacaatgcccgtctggctgctgatgacttccgcaccaagtttgagacagagcaggccctgcgcctgagtgtggaggccgacatcaatggcctgcgcagggtgctggatgagctgaccctggccagagccgacctggagatgcagattgagaacctcaaggaggagctggcctacctgaagaagaaccacgaggaggagatgaacgccctgcgaggccaggtgggtggtgagatcaatgtggagatggacgctgccccaggcgtggacctgagccgcatcctcaacgagatgcgtgaccagtatgagaagatggcagagaagaaccgcaaggatgccgaggattggttcttcagcaagacagaggaactgaaccgcgaggtggccaccaacagtgagctggtgcagagtggcaagagtgagatctcggagctccggcgcaccatgcaggccttggagatagagctgcagtcccagctcagcatgaaagcatccctggagggcaacctggcggagacagagaaccgctactgcgtgcagctgtcccagatccaggggctgattggcagcgtggaggagcagctggcccagcttcgctgcgagatggagcagcagaaccaggaatacaaaatcctgctggatgtgaagacgcggctggagcaggagattgccacctaccgccgcctgctggagggagaggatgcccacctgactcagtacaagaaagaaccggtgaccacccgtcaggtgcgtaccattgtggaagaggtccaggatggcaaggtcatctcctcccgcgagcaggtccaccagaccacccgctgaggactcagctaccccggccggccacccaggaggcagggaggcagccgccccatctgccccacagtctccggcctctccagcctcagccccctgcttcagtcccttccccatgcttccttgcctgatgacaataaagcttgttgactcagctatgatcgctacgcccacttggtggcctataaaggaagcgggcgaaccccggcagccctacacaacttggggcccctctcctctccagcccttctcctgtgtgcctgcctcctgccgccgccaccatgaccacctccatccgccagttcacctcctccagctccatcaagggctcctccggcctggggggcggctcgtcccgcacctcctgccggctgtctggcggcctgggtgccggctcctgcaggctgggatctgctggcggcctgggcagcaccctcgggggtagcagctactccagctgctacagctttggctctggtggtggctatggcagcagctttgggggtgttgatgggctgctggctggaggtgagaaggccaccatgcagaacctcaatgaccgcctggcctcctacctggacaaggtgcgtgccctggaggaggccaacactgagctggaggtgaagatccgtgactggtaccagaggcaggccccggggcccgcccgtgactacagccagtactacaggacaattgaggagctgcagaacaagatcctcacagccaccgtggacaatgccaacatcctgctacagattgacaatgcccgtctggctgctgatgacttccgcaccaagtttgagacagagcaggccctgcgcctgagtgtggaggccgacatcaatggcctgcgcagggtgctggatgagctgaccctggccagagccgacctggagatgcagattgagaacctcaaggaggagctggcctacctgaagaagaaccacgaggaggagatgaacgccctgcgaggccaggtgggtggtgagatcaatgtggagatggacgctgccccaggcgtggacctgagccgcatcctcaacgagatgcgtgaccagtatgagaagatggcagagaagaaccgcaaggatgccgaggattggttcttcagcaagacagaggaactgaaccgcgaggtggccaccaacagtgagctggtgcagagtggcaagagtgagatctcggagctccggcgcaccatgcaggccttggagatagagctgcagtcccagctcagcatgaaagcatccctggagggcaacctggcggagacagagaaccgctactgcgtgcagctgtcccagatccaggggctgattggcagcgtggaggagcagctggcccagcttcgctgcgagatggagcagcagaaccaggaatacaaaatcctgctggatgtgaagacgcggctggagcaggagattgccacctaccgccgcctgctggagggagaggatgcccacctgactcagtacaagaaagaaccggtgaccacccgtcaggtgcgtaccattgtggaagaggtccaggatggcaaggtcatctcctcccgcgagcaggtccaccagaccacccgctgaggactcagctaccccggccggccacccaggaggcagggaggcagccgccccatctgccccacagtctccggcctctccagcctcagccccctgcttcagtcccttccccatgcttccttgcctgatgacaataaagcttgttgactcagctatg

SEQ ID NO: 1031 - DNA, 3989 bp, Homo sapiens
  misc_feature (3954)..(3954): second gene starts at position 3954
atgaacaaagctccacagtccacaggccccccacccgccccatcccccggactcccacagccagcgtttcccccggggcagacagcgccggtggtgttcagtacgccacaagcgacacaaatgaacacgccttctcagccccgccagcacttctaccctagccgggcccagcccccgagcagtgcagcctcccgagtgcagagtgcagcccctgcccgccctggcccagctgcccatgtctaccctgctggatcccaagtaatgatgatcccttcccagatctcctacccagcctcccagggggcctactacatccctggacaggggcgttccacatacgttgtcccgacacagcagtaccctgtgcagccaggagccccaggcttctatccaggtgcaagccctacagaatttgggacctacgctggcgcctactatccagcccaaggggtgcagcagtttcccactggcgtggcccccaccccagttttgatgaaccagccaccccagattgctcccaagagggagcgtaagacgatccgaattcgagatccaaaccaaggaggaaaggatatcacagaggagatcatgtctggggcccgcactgcctccacacccacccctccccagacgggaggcggtctggagcctcaagctaatggggagacgccccaggttgctgtcattgtccggccagatgaccggtcacagggagcaatcattgctgaccggccagggctgcctggcccagagcatagcccttcagaatcccagccttcgtcgccttctccgaccccatcaccatccccagtcttggaaccggggtctgagcctaatctcgcagtcctctctattcctggggacactatgacaactatacaaatgtctgtagaagaatcaacccccatctcccgtgaaactggggagccatatcgcctctctccagaacccactcctctcgccgaacccatactggaagtagaagtgacacttagcaaaccggttccagaatctgagttttcttccagtcctctccaggctcccacccctttggcatctcacacagtggaaattcatgagcctaatggcatggtcccatctgaagatctggaaccagaggtggagtcaagcccagagcttgctcctcccccagcttgcccctccgaatcccctgtgcccattgctccaactgcccaacctgaggaactgctcaacggagccccctcgccaccagctgtggacttaagcccagtcagtgagccagaggagcaggccaaggaggtgacagcatcaatggcgccccccaccatcccctctgctactccagctacggctccttcagctacttccccagctcaggaggaggaaatggaagaagaagaagaagaggaagaaggagaagcaggagaagcaggagaagctgagagtgagaaaggaggagaggaactgctccccccagagagtacccctattccagccaacttgtctcagaatttggaggcagcagcagccactcaagtggcagtatctgtgccaaagaggagacggaaaattaaggagctaaataagaaggaggctgttggagaccttctggatgccttcaaggaggcgaacccggcagtaccagaggtggaaaatcagcctcctgcaggcagcaatccaggcccagagtctgagggcagtggtgtgcccccacgtcctgaggaagcagatgagacctgggactcaaaggaagacaaaattcacaatgctgagaacatccagcccggggaacagaagtatgaatataagtcagatcagtggaagcctctaaacctagaggagaaaaaacgttacgaccgtgagttcctgcttggttttcagttcatctttgccagtatgcagaagccagagggattgccacatatcagtgacgtggtgctggacaaggccaataaaacaccactgcggccactggatcccactagactacaaggcataaattgtggcccagacttcactccatcctttgccaaccttggccggacaacccttagcacccgtgggcccccaaggggtgggccaggtggggagctgccccgtgggccggctggcctgggaccccggcgctctcagcagggaccccgaaaagaaccacgcaagatcattgccacagtgttaatgaccgaagatataaaactgaacaaagcagagaaagcctggaaacccagcagcaagcggacggcggctgataaggatcgaggggaagaagatgctgatggcagcaaaacccaggacctattccgcagggtgcgctccatcctgaataaactgacaccccagatgttccagcagctgatgaagcaagtgacgcagctggccatcgacaccgaggaacgcctcaaaggggtcattgacctcatttttgagaaggccatttcagagcccaacttctctgtggcctatgccaacatgtgccgctgcctcatggcgctgaaagtgcccactacggaaaagccaacagtgactgtgaacttccgaaagctgttgttgaatcgatgtcagaaggagtttgagaaagacaaagatgatgatgaggtttttgagaagaagcaaaaagagatggatgaagctgctacggcagaggaacgaggacgcctgaaggaagagctggaagaggctcgggacatagcccggcggcgctctttagggaatatcaagtttattggagagttgttcaaactgaagatgttaacagaggcaataatgcatgactgtgtggtcaaactgcttaagaaccatgatgaagagtcccttgagtgcctttgtcgtctgctcaccaccattggcaaagacctggactttgaaaaagccaagccccgaatggatcagtatttcaaccagatggaaaaaatcattaaagaaaagaagacgtcatcccgcatccgctttatgctgcaggacgtgctggatctgcgagggagcaattgggtgccacgccgaggggatcagggtcccaagaccattgaccagatccataaggaggctgagatggaagaacatcgagagcacatcaaagtgcagcagctcatggccaagggcagtgacaagcgtcggggcggtcctccaggccctcccatcagccgtggacttccccttgtggatgatggtggctggaacacagttcccatcagcaaaggtagccgccccattgacacctcacgactcaccaagatcaccaagcctggctccatcgattctaacaaccagctctttgcacctggagggcgactgagctggggcaagggcagcagcggaggctcaggagccaagccctcagacgcagcatcagaagctgctcgcccagctactagtactttgaatcgcttctcagcccttcaacaagcggtacccacagaaagcacagataatagacgtgtggtgcagaggagtagcttgagccgagaacgaggcgagaaagctggagaccgaggagaccgcctagagcggagtgaacggggaggggaccgtggggaccggcttgatcgtgcgcggacacctgctaccaagcggagcttcagcaaggaagtggaggagcggagtagagaacggccctcccagcctgaggggctgcgcaaggcagctagcctcacggaggatcgggaccgtgggcgggatgccgtgaagcgagaagctgccctacccccagtgagccccctgaaggcggctctctctgaggaggagttagagaagaaatccaaggctatcattgaggaatatctccatctcaatgacatgaaagaggcagtccagtgcgtgcaggagctggcctcaccctccttgctcttcatctttgtacggcatggtgtcgagtctacgctggagcgcagtgccattgctcgtgagcatatggggcagctgctgcaccagctgctctgtgctgggcatctgtctactgctcagtactaccaaggttacaaaatccaaaataattttattcacattttcag

SEQ ID NO: 1032 - DNA, 3989 bp, Homo sapiens; identical to SEQ ID NO: 1031
  misc_feature (3954)..(3954): second gene starts at position 3954

SEQ ID NO: 1033 - DNA, 3497 bp, Homo sapiens
  misc_feature (3462)..(3462): second gene starts at position 3462
atgaaccagccaccccagattgctcccaagagggagcgtaagacgatccgaattcgagatccaaaccaaggaggaaaggatatcacagaggagatcatgtctggggcccgcactgcctccacacccacccctccccagacgggaggcggtctggagcctcaagctaatggggagacgccccaggttgctgtcattgtccggccagatgaccggtcacagggagcaatcattgctgaccggccagggctgcctggcccagagcatagcccttcagaatcccagccttcgtcgccttctccgaccccatcaccatccccagtcttggaaccggggtctgagcctaatctcgcagtcctctctattcctggggacactatgacaactatacaaatgtctgtagaagaatcaacccccatctcccgtgaaactggggagccatatcgcctctctccagaacccactcctctcgccgaacccatactggaagtagaagtgacacttagcaaaccggttccagaatctgagttttcttccagtcctctccaggctcccacccctttggcatctcacacagtggaaattcatgagcctaatggcatggtcccatctgaagatctggaaccagaggtggagtcaagcccagagcttgctcctcccccagcttgcccctccgaatcccctgtgcccattgctccaactgcccaacctgaggaactgctcaacggagccccctcgccaccagctgtggacttaagcccagtcagtgagccagaggagcaggccaaggaggtgacagcatcaatggcgccccccaccatcccctctgctactccagctacggctccttcagctacttccccagctcaggaggaggaaatggaagaagaagaagaagaggaagaaggagaagcaggagaagcaggagaagctgagagtgagaaaggaggagaggaactgctccccccagagagtacccctattccagccaacttgtctcagaatttggaggcagcagcagccactcaagtggcagtatctgtgccaaagaggagacggaaaattaaggagctaaataagaaggaggctgttggagaccttctggatgccttcaaggaggcgaacccggcagtaccagaggtggaaaatcagcctcctgcaggcagcaatccaggcccagagtctgagggcagtggtgtgcccccacgtcctgaggaagcagatgagacctgggactcaaaggaagacaaaattcacaatgctgagaacatccagcccggggaacagaagtatgaatataagtcagatcagtggaagcctctaaacctagaggagaaaaaacgttacgaccgtgagttcctgcttggttttcagttcatctttgccagtatgcagaagccagagggattgccacatatcagtgacgtggtgctggacaaggccaataaaacaccactgcggccactggatcccactagactacaaggcataaattgtggcccagacttcactccatcctttgccaaccttggccggacaacccttagcacccgtgggcccccaaggggtgggccaggtggggagctgccccgtgggccggctggcctgggaccccggcgctctcagcagggaccccgaaaagaaccacgcaagatcattgccacagtgttaatgaccgaagatataaaactgaacaaagcagagaaagcctggaaacccagcagcaagcggacggcggctgataaggatcgaggggaagaagatgctgatggcagcaaaacccaggacctattccgcagggtgcgctccatcctgaataaactgacaccccagatgttccagcagctgatgaagcaagtgacgcagctggccatcgacaccgaggaacgcctcaaaggggtcattgacctcatttttgagaaggccatttcagagcccaacttctctgtggcctatgccaacatgtgccgctgcctcatggcgctgaaagtgcccactacggaaaagccaacagtgactgtgaacttccgaaagctgttgttgaatcgatgtcagaaggagtttgagaaagacaaagatgatgatgaggtttttgagaagaagcaaaaagagatggatgaagctgctacggcagaggaacgaggacgcctgaaggaagagctggaagaggctcgggacatagcccggcggcgctctttagggaatatcaagtttattggagagttgttcaaactgaagatgttaacagaggcaataatgcatgactgtgtggtcaaactgcttaagaaccatgatgaagagtcccttgagtgcctttgtcgtctgctcaccaccattggcaaagacctggactttgaaaaagccaagccccgaatggatcagtatttcaaccagatggaaaaaatcattaaagaaaagaagacgtcatcccgcatccgctttatgctgcaggacgtgctggatctgcgagggagcaattgggtgccacgccgaggggatcagggtcccaagaccattgaccagatccataaggaggctgagatggaagaacatcgagagcacatcaaagtgcagcagctcatggccaagggcagtgacaagcgtcggggcggtcctccaggccctcccatcagccgtggacttccccttgtggatgatggtggctggaacacagttcccatcagcaaaggtagccgccccattgacacctcacgactcaccaagatcaccaagcctggctccatcgattctaacaaccagctctttgcacctggagggcgactgagctggggcaagggcagcagcggaggctcaggagccaagccctcagacgcagcatcagaagctgctcgcccagctactagtactttgaatcgcttctcagcccttcaacaagcggtacccacagaaagcacagataatagacgtgtggtgcagaggagtagcttgagccgagaacgaggcgagaaagctggagaccgaggagaccgcctagagcggagtgaacggggaggggaccgtggggaccggcttgatcgtgcgcggacacctgctaccaagcggagcttcagcaaggaagtggaggagcggagtagagaacggccctcccagcctgaggggctgcgcaaggcagctagcctcacggaggatcgggaccgtgggcgggatgccgtgaagcgagaagctgccctacccccagtgagccccctgaaggcggctctctctgaggaggagttagagaagaaatccaaggctatcattgaggaatatctccatctcaatgacatgaaagaggcagtccagtgcgtgcaggagctggcctcaccctccttgctcttcatctttgtacggcatggtgtcgagtctacgctggagcgcagtgccattgctcgtgagcatatggggcagctgctgcaccagctgctctgtgctgggcatctgtctactgctcagtactaccaaggttacaaaatccaaaataattttattcacattttcag

SEQ ID NO: 1034 - DNA, 3728 bp, Homo sapiens
  misc_feature (3693)..(3693): second gene starts at position 3693
atgatgatcccttcccagatctcctacccagcctcccagggggcctactacatccctggacaggggcgttccacatacgttgtcccgacacagcagtaccctgtgcagccaggagccccaggcttctatccaggtgcaagccctacagaatttgggacctacgctggcgcctactatccagcccaaggggtgcagcagtttcccactggcgtggcccccaccccagttttgatgaaccagccaccccagattgctcccaagagggagcgtaagacgatccgaattcgagatccaaaccaaggaggaaaggatatcacagaggagatcatgtctggggcccgcactgcctccacacccacccctccccagacgggaggcggtctggagcctcaagctaatggggagacgccccaggttgctgtcattgtccggccagatgaccggtcacagggagcaatcattgctgaccggccagggctgcctggcccagagcatagcccttcagaatcccagccttcgtcgccttctccgaccccatcaccatccccagtcttggaaccggggtctgagcctaatctcgcagtcctctctattcctggggacactatgacaactatacaaatgtctgtagaagaatcaacccccatctcccgtgaaactggggagccatatcgcctctctccagaacccactcctctcgccgaacccatactggaagtagaagtgacacttagcaaaccggttccagaatctgagttttcttccagtcctctccaggctcccacccctttggcatctcacacagtggaaattcatgagcctaatggcatggtcccatctgaagatctggaaccagaggtggagtcaagcccagagcttgctcctcccccagcttgcccctccgaatcccctgtgcccattgctccaactgcccaacctgaggaactgctcaacggagccccctcgccaccagctgtggacttaagcccagtcagtgagccagaggagcaggccaaggaggtgacagcatcaatggcgccccccaccatcccctctgctactccagctacggctccttcagctacttccccagctcaggaggaggaaatggaagaagaagaagaagaggaagaaggagaagcaggagaagcaggagaagctgagagtgagaaaggaggagaggaactgctccccccagagagtacccctattccagccaacttgtctcagaatttggaggcagcagcagccactcaagtggcagtatctgtgccaaagaggagacggaaaattaaggagctaaataagaaggaggctgttggagaccttctggatgccttcaaggaggcgaacccggcagtaccagaggtggaaaatcagcctcctgcaggcagcaatccaggcccagagtctgagggcagtggtgtgcccccacgtcctgaggaagcagatgagacctgggactcaaaggaagacaaaattcacaatgctgagaacatccagcccggggaacagaagtatgaatataagtcagatcagtggaagcctctaaacctagaggagaaaaaacgttacgaccgtgagttcctgcttggttttcagttcatctttgccagtatgcagaagccagagggattgccacatatcagtgacgtggtgctggacaaggccaataaaacaccactgcggccactggatcccactagactacaaggcataaattgtggcccagacttcactccatcctttgccaaccttggccggacaacccttagcacccgtgggcccccaaggggtgggccaggtggggagctgccccgtgggccggctggcctgggaccccggcgctctcagcagggaccccgaaaagaaccacgcaagatcattgccacagtgttaatgaccgaagatataaaactgaacaaagcagagaaagcctggaaacccagcagcaagcggacggcggctgataaggatcgaggggaagaagatgctgatggcagcaaaacccaggacctattccgcagggtgcgctccatcctgaataaactgacaccccagatgttccagcagctgatgaagcaagtgacgcagctggccatcgacaccgaggaacgcctcaaaggggtcattgacctcatttttgagaaggccatttcagagcccaacttctctgtggcctatgccaacatgtgccgctgcctcatggcgctgaaagtgcccactacggaaaagccaacagtgactgtgaacttccgaaagctgttgttgaatcgatgtcagaaggagtttgagaaagacaaagatgatgatgaggtttttgagaagaagcaaaaagagatggatgaagctgctacggcagaggaacgaggacgcctgaaggaagagctggaagaggctcgggacatagcccggcggcgctctttagggaatatcaagtttattggagagttgttcaaactgaagatgttaacagaggcaataatgcatgactgtgtggtcaaactgcttaagaaccatgatgaagagtcccttgagtgcctttgtcgtctgctcaccaccattggcaaagacctggactttgaaaaagccaagccccgaatggatcagtatttcaaccagatggaaaaaatcattaaagaaaagaagacgtcatcccgcatccgctttatgctgcaggacgtgctggatctgcgagggagcaattgggtgccacgccgaggggatcagggtcccaagaccattgaccagatccataaggaggctgagatggaagaacatcgagagcacatcaaagtgcagcagctcatggccaagggcagtgacaagcgtcggggcggtcctccaggccctcccatcagccgtggacttccccttgtggatgatggtggctggaacacagttcccatcagcaaaggtagccgccccattgacacctcacgactcaccaagatcaccaagcctggctccatcgattctaacaaccagctctttgcacctggagggcgactgagctggggcaagggcagcagcggaggctcaggagccaagccctcagacgcagcatcagaagctgctcgcccagctactagtactttgaatcgcttctcagcccttcaacaagcggtacccacagaaagcacagataatagacgtgtggtgcagaggagtagcttgagccgagaacgaggcgagaaagctggagaccgaggagaccgcctagagcggagtgaacggggaggggaccgtggggaccggcttgatcgtgcgcggacacctgctaccaagcggagcttcagcaaggaagtggaggagcggagtagagaacggccctcccagcctgaggggctgcgcaaggcagctagcctcacggaggatcgggaccgtgggcgggatgccgtgaagcgagaagctgccctacccccagtgagccccctgaaggcggctctctctgaggaggagttagagaagaaatccaaggctatcattgaggaatatctccatctcaatgacatgaaagaggcagtccagtgcgtgcaggagctggcctcaccctccttgctcttcatctttgtacggcatggtgtcgagtctacgctggagcgcagtgccattgctcgtgagcatatggggcagctgctgcaccagctgctctgtgctgggcatctgtctactgctcagtactaccaaggttacaaaatccaaaataattttattcacattttcag

SEQ ID NO: 1035 - DNA, 3989 bp, Homo sapiens; identical to SEQ ID NO: 1031
  misc_feature (3954)..(3954): second gene starts at position 3954

SEQ ID NO: 1036 - DNA, 3803 bp, Homo sapiens
  misc_feature (3768)..(3768): second gene starts at position 3768
atgaacaaagctccacagtccacaggccccccacccgccccatcccccggactcccacagccagcgtttcccccggggcagacagcgccggtggtgttcagtacgccacaagcgacacaaatgaacacgccttctcagccccgccagcacttctaccctagccgggcccagcccccgagcagtgcagcctcccgagtgcagagtgcagcccctgcccgccctggcccagctgcccatgtctaccctgctggatcccaagtaatgatgatcccttcccagatctcctacccagcctcccagggggcctactacatccctggacaggggcgttccacatacgttgtcccgacacagcagtaccctgtgcagccaggagccccaggcttctatccaggtgcaagccctacagaatttgggacctacgctggcgcctactatccagcccaaggggtgcagcagtttcccactggcgtggcccccaccccagttttgatgaaccagccaccccagattgctcccaagagggagcgtaagacgatccgaattcgagatccaaaccaaggaggaaaggatatcacagaggagatcatgtctggggcccgcactgcctccacacccacccctccccagacgggaggcggtctggagcctcaagctaatggggagacgccccaggttgctgtcattgtccggccagatgaccggtcacagggagcaatcattgctgaccggccagggctgcctggcccagagcatagcccttcagaatcccagccttcgtcgccttctccgaccccatcaccatccccagtcttggaaccggggtctgagcctaatctcgcagtcctctctattcctggggacactatgacaactatacaaatgtctgtagaagaatcaacccccatctcccgtgaaactggggagccatatcgcctctctccagaacccactcctctcgccgaacccatactggaagtagaagtgacacttagcaaaccggttccagaatctgagttttcttccagtcctctccaggctcccacccctttggcatctcacacagtggaaattcatgagcctaatggcatggtcccatctgaagatctggaaccagaggtggagtcaagcccagagcttgctcctcccccagcttgcccctccgaatcccctgtgcccattgctccaactgcccaacctgaggaactgctcaacggagccccctcgccaccagctgtggacttaagcccagtcagtgagccagaggagcaggccaaggaggtgacagcatcaatggcgccccccaccatcccctctgctactccagctacggctccttcagctacttccccagctcaggaggaggaaatggaagaagaagaagaagaggaagaaggagaagcaggagaagcaggagaagctgagagtgagaaaggaggagaggaactgctccccccagagagtacccctattccagccaacttgtctcagaatttggaggcagcagcagccactcaagtggcagtatctgtgccaaagaggagacggaaaattaaggagctaaataagaaggaggctgttggagaccttctggatgccttcaaggaggcgaacccggcagtaccagaggtggaaaatcagcctcctgcaggcagcaatccaggcccagagtctgagggcagtggtgtgcccccacgtcctgaggaagcagatgagacctgggactcaaaggaagacaaaattcacaatgctgagaacatccagcccggggaacagaagtatgaatataagtcagatcagtggaagcctctaaacctagaggagaaaaaacgttacgaccgtgagttcctgcttggttttcagttcatctttgccagtatgcagaagccagagggattgccacatatcagtgacgtggtgctggacaaggccaataaaacaccactgcggccactggatcccactagactacaaggcataaattgtggcccagacttcactccatcctttgccaaccttggccggacaacccttagcacccgtgggcccccaaggggtgggccaggtggggagctgccccgtgggccggacctattccgcagggtgcgctccatcctgaataaactgacaccccagatgttccagcagctgatgaagcaagtgacgcagctggccatcgacaccgaggaacgcctcaaaggggtcattgacctcatttttgagaaggccatttcagagcccaacttctctgtggcctatgccaacatgtgccgctgcctcatggcgctgaaagtgcccactacggaaaagccaacagtgactgtgaacttccgaaagctgttgttgaatcgatgtcagaaggagtttgagaaagacaaagatgatgatgaggtttttgagaagaagcaaaaagagatggatgaagctgctacggcagaggaacgaggacgcctgaaggaagagctggaagaggctcgggacatagcccggcggcgctctttagggaatatcaagtttattggagagttgttcaaactgaagatgttaacagaggcaataatgcatgactgtgtggtcaaactgcttaagaaccatgatgaagagtcccttgagtgcctttgtcgtctgctcaccaccattggcaaagacctggactttgaaaaagccaagccccgaatggatcagtatttcaaccagatggaaaaaatcattaaagaaaagaagacgtcatcccgcatccgctttatgctgcaggacgtgctggatctgcgagggagcaattgggtgccacgccgaggggatcagggtcccaagaccattgaccagatccataaggaggctgagatggaagaacatcgagagcacatcaaagtgcagcagctcatggccaagggcagtgacaagcgtcggggcggtcctccaggccctcccatcagccgtggacttccccttgtggatgatggtggctggaacacagttcccatcagcaaaggtagccgccccattgacacctcacgactcaccaagatcaccaagcctggctccatcgattctaacaaccagctctttgcacctggagggcgactgagctggggcaagggcagcagcggaggctcaggagccaagccctcagacgcagcatcagaagctgctcgcccagctactagtactttgaatcgcttctcagcccttcaacaagcggtacccacagaaagcacagataatagacgtgtggtgcagaggagtagcttgagccgagaacgaggcgagaaagctggagaccgaggagaccgcctagagcggagtgaacggggaggggaccgtggggaccggcttgatcgtgcgcggacacctgctaccaagcggagcttcagcaaggaagtggaggagcggagtagagaacggccctcccagcctgaggggctgcgcaaggcagctagcctcacggaggatcgggaccgtgggcgggatgccgtgaagcgagaagctgccctacccccagtgagccccctgaaggcggctctctctgaggaggagttagagaagaaatccaaggctatcattgaggaatatctccatctcaatgacatgaaagaggcagtccagtgcgtgcaggagctggcctcaccctccttgctcttcatctttgtacggcatggtgtcgagtctacgctggagcgcagtgccattgctcgtgagcatatggggcagctgctgcaccagctgctctgtgctgggcatctgtctactgctcagtactaccaaggttacaaaatccaaaataattttattcacattttcag

SEQ ID NO: 1037 - DNA, 18588 bp, Homo sapiens
  misc_feature (625)..(625): second gene starts at position 625
atgcctgaggaagtgcaccatggagaggaggaggtggagacttttgcctttcaggcagaaattgcccaactcatgtccctcatcatcaataccttctattccaacaaggagattttccttcgggagttgatctctaatgcttctgatgccttggacaagattcgctatgagagcctgacagacccttcgaagttggacagtggtaaagagctgaaaattgacatcatccccaaccctcaggaacgtaccctgactttggtagacacaggcattggcatgaccaaagctgatctcataaataatttgggaaccattgccaagtctggtactaaagcattcatggaggctcttcaggctggtgcagacatctccatgattgggcagtttggtgttggcttttattctgcctacttggtggcagagaaagtggttgtgatcacaaagcacaacgatgatgaacagtatgcttgggagtcttctgctggaggttccttcactgtgcgtgctgaccatggtgagcccattggcaggggtaccaaagtgatcctccatcttaaagaagatcagacagagtacctagaagagaggcgggtcaaagaagtagtgaagaagcattctcagttcataggctatcccatcaccctttatttggagaaggaacgagagaaggaaattagtgatgatgaggcagaggaagagaaaggtgagaaagaagaggaagataaagatgatgaagaaaaacccaagatcgaagatgtgggttcagatgaggaggatgacagcggtaaggataagaagaagaaaactaagaagatcaaagagaaatacattgatcaggaagaactaaacaagaccaagcctatttggaccagaaaccctgatgacatcacccaagaggagtatggagaattctacaagagcctcactaatgactgggaagaccacttggcagtcaagcacttttctgtagaaggtcagttggaattcagggcattgctatttattcctcgtcgggctccctttgacctttttgagaacaagaagaaaaagaacaacatcaaactctatgtccgccgtgtgttcatcatggacagctgtgatgagttgataccagagtatctcaattttatccgtggtgtggttgactctgaggatctgcccctgaacatctcccgagaaatgctccagcagagcaaaatcttgaaagtcattcgcaaaaacattgttaagaagtgccttgagctcttctctgagctggcagaagacaaggagaattacaagaaattctatgaggcattctctaaaaatctcaagcttggaatccacgaagactccactaaccgccgccgcctgtctgagctgctgcgctatcatacctcccagtctggagatgagatgacatctctgtcagagtatgtttctcgcatgaaggagacacagaagtccatctattacatcactggtgagagcaaagagcaggtggccaactcagcttttgtggagcgagtgcggaaacggggcttcgaggtggtatatatgaccgagcccattgacgagtactgtgtgcagcagctcaaggaatttgatgggaagagcctggtctcagttaccaaggagggtctggcagctctctcatctcctggaaccatggccagcacatccaccaccatcaggagccacagcagcagccgccggggtttcagtgccaactcagccaggctccctggggtcagccgctctggcttcagcagcgtctccgtgtcccgctccaggggcagtggtggcctgggtggtgcatgtggaggagctggctttggcagccgcagtctgtatggcctggggggctccaagaggatctccattggagggggcagctgtgccatcagtggcggctatggcagcagagccggaggcagctatggctttggtggcgccgggagtggatttggtttcggtggtggagccggcattggctttggtctgggtggtggagccggccttgctggtggctttgggggccctggcttccctgtgtgcccccctggaggcatccaagaggtcaccgtcaaccagagtctcctgactcccctcaacctgcaaatcgatcccaccatccagcgggtgcgggctgaggagcgtgaacagatcaagaccctcaacaacaagtttgcctccttcatcgacaaggtgcggttcctggagcagcagaacaaggttctggaaacaaagtggaccctgctgcaggagcagggcaccaagactgtgaggcagaacctggagccgttgttcgagcagtacatcaacaacctcaggaggcagctggacagcattgtcggggaacggggccgcctggactcagagctcagaggcatgcaggacctggtggaggacttcaagaacaaatatgaggatgaaatcaacaagcgcacagcagcagagaatgaatttgtgactctgaagaaggatgtggatgctgcctacatgaacaaggttgaactgcaagccaaggcagacactctcacagacgagatcaacttcctgagagccttgtatgatgcagagctgtcccagatgcagacccacatctcagacacatctgtggtgctgtccatggacaacaaccgcaacctggacctggacagcatcatcgctgaggtcaaggcccaatatgaggagattgctcagagaagccgggctgaggctgagtcctggtaccagaccaagtacgaggagctgcaggtcacagcaggcagacatggggacgacctgcgcaacaccaagcaggagattgctgagatcaaccgcatgatccagaggctgagatctgagatcgaccacgtcaagaagcagtgcgccaacctgcaggccgccattgctgatgctgagcagcgtggggagatggccctcaaggatgccaagaacaagctggaagggctggaggatgccctgcagaaggccaagcaggacctggcccggctgctgaaggagtaccaggagctgatgaatgtcaagctggccctggacgtggagatcgccacctaccgcaagctgctggagggtgaggagtgcaggctgaatggcgaaggcgttggacaagtcaacatctctgtggtgcagtccaccgtctccagtggctatggcggtgccagtggtgtcggcagtggcttaggcctgggtggaggaagcagctactcctatggcagtggtcttggcgttggaggtggcttcagttccagcagtggcagagccattgggggtggcctcagctctgttggaggcggcagttccaccatcaagtacaccaccacctcctcctccagcaggaagagctataagcactaaagtgcgtctgctagctctcggtcccacagtcctcaggcccctctctggctgcagagccctctcctcaggttgcctttcctctcctggcctccagtctcccctgctgtcccaggtagagctgggtatggatgcttagtgccctcacttcttctctctctctctataccatctgagcacccattgctcaccatcagatcaacctctgattttacatcatgatgtaatcaccactggagcttcactgttactaaattattaatttcttgcctccagtgttctatctctgaggctgagcattataagaaaatgacctctgctccttttcattgcagaaaattgccaggggcttatttcagaacaacttccacttactttccactggctctcaaactctctaacttataagtgttgtgaacccccacccaggcagtatccatgaaagcacaagtgactagtcctatgatgtacaaagcctgtatctctgtgatgatttctgtgctcttcgctgtttgcaattgctaaataaagcagatttataatacaataatatttcatacctttctagaaactgggtgtgatctcactgttggtaaagcccagcccttcccaacctgcaagctcaccttccaggactgggcccagcccatgctctccatatataagctgctgccccgagcctgattcctagtcctgcttctcttccctctctcctccagcctctcacactctcctcagctctctcatctcctggaaccatggccagcacatccaccaccatcaggagccacagcagcagccgccggggtttcagtgccaactcagccaggctccctggggtcagccgctctggcttcagcagcgtctccgtgtcccgctccaggggcagtggtggcctgggtggtgcatgtggaggagctggctttggcagccgcagtctgtatggcctggggggctccaagaggatctccattggagggggcagctgtgccatcagtggcggctatggcagcagagccggaggcagctatggctttggtggcgccgggagtggatttggtttcggtggtggagccggcattggctttggtctgggtggtggagccggccttgctggtggctttgggggccctggcttccctgtgtgcccccctggaggcatccaagaggtcaccgtcaaccagagtctcctgactcccctcaacctgcaaatcgatcccaccatccagcgggtgcgggctgaggagcgtgaacagatcaagaccctcaacaacaagtttgcctccttcatcgacaaggtgcggttcctggagcagcagaacaaggttctggaaacaaagtggaccctgctgcaggagcagggcaccaagactgtgaggcagaacctggagccgttgttcgagcagtacatcaacaacctcaggaggcagctggacagcattgtcggggaacggggccgcctggactcagagctcagaggcatgcaggacctggtggaggacttcaagaacaaatatgaggatgaaatcaacaagcgcacagcagcagagaatgaatttgtgactctgaagaaggatgtggatgctgcctacatgaacaaggttgaactgcaagccaaggcagacactctcacagacgagatcaacttcctgagagccttgtatgatgcagagctgtcccagatgcagacccacatctcagacacatctgtggtgctgtccatggacaacaaccgcaacctggacctggacagcatcatcgctgaggtcaaggcccaatatgaggagattgctcagagaagccgggctgaggctgagtcctggtaccagaccaagtacgaggagctgcaggtcacagcaggcagacatggggacgacctgcgcaacaccaagcaggagattgctgagatcaaccgcatgatccagaggctgagatctgagatcgaccacgtcaagaagcagtgcgccaacctgcaggccgccattgctgatgctgagcagcgtggggagatggccctcaaggatgccaagaacaagctggaagggctggaggatgccctgcagaaggccaagcaggacctggcccggctgctgaaggagtaccaggagctgatgaatgtcaagctggccctggacgtggagatcgccacctaccgcaagctgctggagggtgaggagtgcaggctgaatggcgaaggcgttggacaagtcaacatctctgtggtgcagtccaccgtctccagtggctatggcggtgccagtggtgtcggcagtggcttaggcctgggtggaggaagcagctactcctatggcagtggtcttggcgttggaggtggcttcagttccagcagtggcagagccattgggggtggcctcagctctgttggaggcggcagttccaccatcaagtacaccaccacctcctcctccagcaggaagagctataagcactaaagtgcgtctgctagctctcggtcccacagtcctcaggcccctctctggctgcagagccctctcctcaggttgcctttcctctcctggcctccagtctcccctgctgtcccaggtagagctgggtatggatgcttagtgccctcacttcttctctctctctctataccatctgagcacccattgctcaccatcagatcaacctctgattttacatcatgatgtaatcaccactggagcttcactgttactaaattattaatttcttgcctccagtgttctatctctgaggctgagcattataagaaaatgacctctgctccttttcattgcagaaaattgccaggggcttatttcagaacaacttccacttactttccactggctctcaaactctctaacttataagtgttgtgaacccccacccaggcagtatccatgaaagcacaagtgactagtcctatgatgtacaaagcctgtatctctgtgatgatttctgtgctcttcgctgtttgcaattgctaaataaagcagatttataatacaataatatttcatacctttctagaaactgggtgtgatctcactgttggtaaagcccagcccttcccaacctgcaagctcaccttccaggactgggcccagcccatgctctccatatataagctgctgccccgagcctgattcctagtcctgcttctcttccctctctcctccagcctctcacactctcctcagctctctcatctcctggaaccatggccagcacatccaccaccatcaggagccacagcagcagccgccggggtttcagtgccaactcagccaggctccctggggtcagccgctctggcttcagcagcgtctccgtgtcccgctccaggggcagtggtggcctgggtggtgcatgtggaggagctggctttggcagccgcagtctgtatggcctggggggctccaagaggatctccattggagggggcagctgtgccatcagtggcggctatggcagcagagccggaggcagctatggctttggtggcgccgggagtggatttggtttcggtggtggagccggcattggctttggtctgggtggtggagccggccttgctggtggctttgggggccctggcttccctgtgtgcccccctggaggcatccaagaggtcaccgtcaaccagagtctcctgactcccctcaacctgcaaatcgatcccaccatccagcgggtgcgggctgaggagcgtgaacagatcaagaccctcaacaacaagtttgcctccttcatcgacaaggtgcggttcctggagcagcagaacaaggttctggaaacaaagtggaccctgctgcaggagcagggcaccaagactgtgaggcagaacctggagccgttgttcgagcagtacatcaacaacctcaggaggcagctggacagcattgtcggggaacggggccgcctggactcagagctcagaggcatgcaggacctggtggaggacttcaagaacaaatatgaggatgaaatcaacaagcgcacagcagcagagaatgaatttgtgactctgaagaaggatgtggatgctgcctacatgaacaaggttgaactgcaagccaaggcagacactctcacagacgagatcaacttcctgagagccttgtatgatgcagagctgtcccagatgcagacccacatctcagacacatctgtggtgctgtccatggacaacaaccgcaacctggacctggacagcatcatcgctgaggtcaaggcccaatatgaggagattgctcagagaagccgggctgaggctgagtcctggtaccagaccaagtacgaggagctgcaggtcacagcaggcagacatggggacgacctgcgcaacaccaagcaggagattgctgagatcaaccgcatgatccagaggctgagatctgagatcgaccacgtcaagaagcagtgcgccaacctgcaggccgccattgctgatgctgagcagcgtggggagatggccctcaaggatgccaagaacaagctggaagggctggaggatgccctgcagaaggccaagcaggacctggcccggctgctgaaggagtaccaggagctgatgaatgtcaagctggccctggacgtggagatcgccacctaccgcaagctgctggagggtgaggagtgcaggctgaatggcgaaggcgttggacaagtcaacatctctgtggtgcagtccaccgtctccagtggctatggcggtgccagtggtgtcggcagtggcttaggcctgggtggaggaagcagctactcctatggcagtggtcttggcgttggaggtggcttcagttccagcagtggcagagccattgggggtggcctcagctctgttggaggcggcagttccaccatcaagtacaccaccacctcctcctccagcaggaagagctataagcactaaagtgcgtctgctagctctcggtcccacagtcctcaggcccctctctggctgcagagccctctcctcaggttgcctttcctctcctggcctccagtctcccctgctgtcccaggtagagctgggtatggatgcttagtgccctcacttcttctctctctctctataccatctgagcacccattgctcaccatcagatcaacctctgattttacatcatgatgtaatcaccactggagcttcactgttactaaattattaatttcttgcctccagtgttctatctctgaggctgagcattataagaaaatgacctctgctccttttcattgcagaaaattgccaggggcttatttcagaacaacttccacttactttccactggctctcaaactctctaacttataagtgttgtgaacccccacccaggcagtatccatgaaagcacaagtgactagtcctatgatgtacaaagcctgtatctctgtgatgatttctgtgctcttcgctgtttgcaattgctaaataaagcagatttataatacaataatatttcatacctttctagaaactgggtgtgatctcactgttggtaaagcccagcccttcccaacctgcaagctcaccttccaggactgggcccagcccatgctctccatatataagctgctgccccgagcctgattcctagtcctgcttctcttccctctctcctccagcctctcacactctcctcagctctctcatctcctggaaccatggccagcacatccaccaccatcaggagccacagcagcagccgccggggtttcagtgccaactcagccaggctccctggggtcagccgctctggcttcagcagcgtctccgtgtcccgctccaggggcagtggtggcctgggtggtgcatgtggaggagctggctttggcagccgcagtctgtatggcctggggggctccaagaggatctccattggagggggcagctgtgccatcagtggcggctatggcagcagagccggaggcagctatggctttggtggcgccgggagtggatttggtttcggtggtggagccggcattggctttggtctgggtggtggagccggccttgctggtggctttgggggccctggcttccctgtgtgcccccctggaggcatccaagaggtcaccgtcaaccagagtctcctgactcccctcaacctgcaaatcgatcccaccatccagcgggtgcgggctgaggagcgtgaacagatcaagaccctcaacaacaagtttgcctccttcatcgacaaggtgcggttcctggagcagcagaacaaggttctggaaacaaagtggaccctgctgcaggagcagggcaccaagactgtgaggcagaacctggagccgttgttcgagcagtacatcaacaacctcaggaggcagctggacagcattgtcggggaacggggccgcctggactcagagctcagaggcatgcaggacctggtggaggacttcaagaacaaatatgaggatgaaatcaacaagcgcacagcagcagagaatgaatttgtgactctgaagaaggatgtggatgctgcctacatgaacaaggttgaactgcaagccaaggcagacactctcacagacgagatcaacttcctgagagccttgtatgatgcagagctgtcccagatgcagacccacatctcagacacatctgtggtgctgtccatggacaacaaccgcaacctggacctggacagcatcatcgctgaggtcaaggcccaatatgaggagattgctcagagaagccgggctgaggctgagtcctggtaccagaccaagtacgaggagctgcaggtcacagcaggcagacatggggacgacctgcgcaacaccaagcaggagattgctgagatcaaccgcatgatccagaggctgagatctgagatcgaccacgtcaagaagcagtgcgccaacctgcaggccgccattgctgatgctgagcagcgtggggagatggccctcaaggatgccaagaacaagctggaagggctggaggatgccctgcagaaggccaagcaggacctggcccggctgctgaaggagtaccaggagctgatgaatgtcaagctggccctggacgtggagatcgccacctaccgcaagctgctggagggtgaggagtgcaggctgaatggcgaaggcgttggacaagtcaacatctctgtggtgcagtccaccgtctccagtggctatggcggtgccagtggtgtcggcagtggcttaggcctgggtggaggaagcagctactcctatggcagtggtcttggcgttggaggtggcttcagttccagcagtggcagagccattgggggtggcctcagctctgttggaggcggcagttccaccatcaagtacaccaccacctcctcctccagcaggaagagctataagcactaaagtgcgtctgctagctctcggtcccacagtcctcaggcccctctctggctgcagagccctctcctcaggttgcctttcctctcctggcctccagtctcccctgctgtcccaggtagagctgggtatggatgcttagtgccctcacttcttctctctctctctataccatctgagcacccattgctcaccatcagatcaacctctgattttacatcatgatgtaatcaccactggagcttcactgttactaaattattaatttcttgcctccagtgttctatctctgaggctgagcattataagaaaatgacctctgctccttttcattgcagaaaattgccaggggcttatttcagaacaacttccacttactttccactggctctcaaactctctaacttataagtgttgtgaacccccacccaggcagtatccatgaaagcacaagtgactagtcctatgatgtacaaagcctgtatctctgtgatgatttctgtgctcttcgctgtttgcaattgctaaataaagcagatttataatacaataatatttcatacctttctagaaactgggtgtgatctcactgttggtaaagcccagcccttcccaacctgcaagctcaccttccaggactgggcccagcccatgctctccatatataagctgctgccccgagcctgattcctagtcctgcttctcttccctctctcctccagcctctcacactctcctcagctctctcatctcctggaaccatggccagcacatccaccaccatcaggagccacagcagcagccgccggggtttcagtgccaactcagccaggctccctggggtcagccgctctggcttcagcagcgtctccgtgtcccgctccaggggcagtggtggcctgggtggtgcatgtggaggagctggctttggcagccgcagtctgtatggcctggggggctccaagaggatctccattggagggggcagctgtgccatcagtggcggctatggcagcagagccggaggcagctatggctttggtggcgccgggagtggatttggtttcggtggtggagccggcattggctttggtctgggtggtggagccggccttgctggtggctttgggggccctggcttccctgtgtgcccccctggaggcatccaagaggtcaccgtcaaccagagtctcctgactcccctcaacctgcaaatcgatcccaccatccagcgggtgcgggctgaggagcgtgaacagatcaagaccctcaacaacaagtttgcctccttcatcgacaaggtgcggttcctggagcagcagaacaaggttctggaaacaaagtggaccctgctgcaggagcagggcaccaagactgtgaggcagaacctggagccgttgttcgagcagtacatcaacaacctcaggaggcagctggacagcattgtcggggaacggggccgcctggactcagagctcagaggcatgcaggacctggtggaggacttcaagaacaaatatgaggatgaaatcaacaagcgcacagcagcagagaatgaatttgtgactctgaagaaggatgtggatgctgcctacatgaacaaggttgaactgcaagccaaggcagacactctcacagacgagatcaacttcctgagagccttgtatgatgcagagctgtcccagatgcagacccacatctcagacacatctgtggtgctgtccatggacaacaaccgcaacctggacctggacagcatcatcgctgaggtcaaggcccaatatgaggagattgctcagagaagccgggctgaggctgagtcctggtaccagaccaagtacgaggagctgcaggtcacagcaggcagacatggggacgacctgcgcaacaccaagcaggagattgctgagatcaaccgcatgatccagaggctgagatctgagatcgaccacgtcaagaagcagtgcgccaacctgcaggccgccattgctgatgctgagcagcgtggggagatggccctcaaggatgccaagaacaagctggaagggctggaggatgccctgcagaaggccaagcaggacctggcccggctgctgaaggagtaccaggagctgatgaatgtcaagctggccctggacgtggagatcgccacctaccgcaagctgctggagggtgaggagtgcaggctgaatggcgaaggcgttggacaagtcaacatctctgtggtgcagtccaccgtctccagtggctatggcggtgccagtggtgtcggcagtggcttaggcctgggtggaggaagcagctactcctatggcagtggtcttggcgttggaggtggcttcagttccagcagtggcagagccattgggggtggcctcagctctgttggaggcggcagttccaccatcaagtacaccaccacctcctcctccagcaggaagagctataagcactaaagtgcgtctgctagctctcggtcccacagtcctcaggcccctctctggctgcagagccctctcctcaggttgcctttcctctcctggcctccagtctcccctgctgtcccaggtagagctgggtatggatgcttagtgccctcacttcttctctctctctctataccatctgagcacccattgctcaccatcagatcaacctctgattttacatcatgatgtaatcaccactggagcttcactgttactaaattattaatttcttgcctccagtgttctatctctgaggctgagcattataagaaaatgacctctgctccttttcattgcagaaaattgccaggggcttatttcagaacaacttccacttactttccactggctctcaaactctctaacttataagtgttgtgaacccccacccaggcagtatccatgaaagcacaagtgactagtcctatgatgtacaaagcctgtatctctgtgatgatttctgtgctcttcgctgtttgcaattgctaaataaagcagatttataatacaataatatttcatacctttctagaaactgggtgtgatctcactgttggtaaagcccagcccttcccaacctgcaagctcaccttccaggactgggcccagcccatgctctccatatataagctgctgccccgagcctgattcctagtcctgcttctcttccctctctcctccagcctctcacactctcctcagctctctcatctcctggaaccatggccagcacatccaccaccatcaggagccacagcagcagccgccggggtttcagtgccaactcagccaggctccctggggtcagccgctctggcttcagcagcgtctccgtgtcccgctccaggggcagtggtggcctgggtggtgcatgtggaggagctggctttggcagccgcagtctgtatggcctggggggctccaagaggatctccattggagggggcagctgtgccatcagtggcggctatggcagcagagccggaggcagctatggctttggtggcgccgggagtggatttggtttcggtggtggagccggcattggctttggtctgggtggtggagccggccttgctggtggctttgggggccctggcttccctgtgtgcccccctggaggcatccaagaggtcaccgtcaaccagagtctcctgactcccctcaacctgcaaatcgatcccaccatccagcgggtgcgggctgaggagcgtgaacagatcaagaccctcaacaacaagtttgcctccttcatcgacaaggtgcggttcctggagcagcagaacaaggttctggaaacaaagtggaccctgctgcaggagcagggcaccaagactgtgaggcagaacctggagccgttgttcgagcagtacatcaacaacctcaggaggcagctggacagcattgtcggggaacggggccgcctggactcagagctcagaggcatgcaggacctggtggaggacttcaagaacaaatatgaggatgaaatcaacaagcgcacagcagcagagaatgaatttgtgactctgaagaaggatgtggatgctgcctacatgaacaaggttgaactgcaagccaaggcagacactctcacagacgagatcaacttcctgagagccttgtatgatgcagagctgtcccagatgcagacccacatctcagacacatctgtggtgctgtccatggacaacaaccgcaacctggacctggacagcatcatcgctgaggtcaaggcccaatatgaggagattgctcagagaagccgggctgaggctgagtcctggtaccagaccaagtacgaggagctgcaggtcacagcaggcagacatggggacgacctgcgcaacaccaagcaggagattgctgagatcaaccgcatgatccagaggctgagatctgagatcgaccacgtcaagaagcagtgcgccaacctgcaggccgccattgctgatgctgagcagcgtggggagatggccctcaaggatgccaagaacaagctggaagggctggaggatgccctgcagaaggccaagcaggacctggcccggctgctgaaggagtaccaggagctgatgaatgtcaagctggccctggacgtggagatcgccacctaccgcaagctgctggagggtgaggagtgcaggctgaatggcgaaggcgttggacaagtcaacatctctgtggtgcagtccaccgtctccagtggctatggcggtgccagtggtgtcggcagtggcttaggcctgggtggaggaagcagctactcctatggcagtggtcttggcgttggaggtggcttcagttccagcagtggcagagccattgggggtggcctcagctctgttggaggcggcagttccaccatcaagtacaccaccacctcctcctccagcaggaagagctataagcactaaagtgcgtctgctagctctcggtcccacagtcctcaggcccctctctggctgcagagccctctcctcaggttgcctttcctctcctggcctccagtctcccctgctgtcccaggtagagctgggtatggatgcttagtgccctcacttcttctctctctctctataccatctgagcacccattgctcaccatcagatcaacctctgattttacatcatgatgtaatcaccactggagcttcactgttactaaattattaatttcttgcctccagtgttctatctctgaggctgagcattataagaaaatgacctctgctccttttcattgcagaaaattgccaggggcttatttcagaacaacttccacttactttccactggctctcaaactctctaacttataagtgttgtgaacccccacccaggcagtatccatgaaagcacaagtgactagtcctatgatgtacaaagcctgtatctctgtgatgatttctgtgctcttcgctgtttgcaattgctaaataaagcagatttataatacaataatatttcatacctttctagaaactgggtgtgatctcactgttggtaaagcccagcccttcccaacctgcaagctcaccttccaggactgggcccagcccatgctctccatatataagctgctgccccgagcctgattcctagtcctgcttctcttccctctctcctccagcctctcacactctcctcagctctctcatctcctggaaccatggccagcacatccaccaccatcaggagccacagcagcagccgccggggtttcagtgccaactcagccaggctccctggggtcagccgctctggcttcagcagcgtctccgtgtcccgctccaggggcagtggtggcctgggtggtgcatgtggaggagctggctttggcagccgcagtctgtatggcctggggggctccaagaggatctccattggagggggcagctgtgccatcagtggcggctatggcagcagagccggaggcagctatggctttggtggcgccgggagtggatttggtttcggtggtggagccggcattggctttggtctgggtggtggagccggccttgctggtggctttgggggccctggcttccctgtgtgcccccctggaggcatccaagaggtcaccgtcaaccagagtctcctgactcccctcaacctgcaaatcgatcccaccatccagcgggtgcgggctgaggagcgtgaacagatcaagaccctcaacaacaagtttgcctccttcatcgacaaggtgcggttcctggagcagcagaacaaggttctggaaacaaagtggaccctgctgcaggagcagggcaccaagactgtgaggcagaacctggagccgttgttcgagcagtacatcaacaacctcaggaggcagctggacagcattgtcggggaacggggccgcctggactcagagctcagaggcatgcaggacctggtggaggacttcaagaacaaatatgaggatgaaatcaacaagcgcacagcagcagagaatgaatttgtgactctgaagaaggatgtggatgctgcctacatgaacaaggttgaactgcaagccaaggcagacactctcacagacgagatcaacttcctgagagccttgtatgatgcagagctgtcccagatgcagacccacatctcagacacatctgtggtgctgtccatggacaacaaccgcaacctggacctggacagcatcatcgctgaggtcaaggcccaatatgaggagattgctcagagaagccgggctgaggctgagtcctggtaccagaccaagtacgaggagctgcaggtcacagcaggcagacatggggacgacctgcgcaacaccaagcaggagattgctgagatcaaccgcatgatccagaggctgagatctgagatcgaccacgtcaagaagcagtgcgccaacctgcaggccgccattgctgatgctgagcagcgtggggagatggccctcaaggatgccaagaacaagctggaagggctggaggatgccctgcagaaggccaagcaggacctggcccggctgctgaaggagtaccaggagctgatgaatgtcaagctggccctggacgtggagatcgccacctaccgcaagctgctggagggtgaggagtgcaggctgaatggcgaaggcgttggacaagtcaacatctctgtggtgcagtccaccgtctccagtggctatggcggtgccagtggtgtcggcagtggcttaggcctgggtggaggaagcagctactcctatggcagtggtcttggcgttggaggtggcttcagttccagcagtggcagagccattgggggtggcctcagctctgttggaggcggcagttccaccatcaagtacaccaccacctcctcctccagcaggaagagctataagcactaaagtgcgtctgctagctctcggtcccacagtcctcaggcccctctctggctgcagagccctctcctcaggttgcctttcctctcctggcctccagtctcccctgctgtcccaggtagagctgggtatggatgcttagtgccctcacttcttctctctctctctataccatctgagcacccattgctcaccatcagatcaacctctgattttacatcatgatgtaatcaccactggagcttcactgttactaaattattaatttcttgcctccagtgttctatctctgaggctgagcattataagaaaatgacctctgctccttttcattgcagaaaattgccaggggcttatttcagaacaacttccacttactttccactggctctcaaactctctaacttataagtgttgtgaacccccacccaggcagtatccatgaaagcacaagtgactagtcctatgatgtacaaagcctgtatctctgtgatgatttctgtgctcttcgctgtttgcaattgctaaataaagcagatttataatacaata

SEQ ID NO: 1038 - DNA, 18588 bp, Homo sapiens; identical to SEQ ID NO: 1037
  misc_feature (625)..(625): second gene starts at position 625

SEQ ID NO: 1039 - DNA, 32767 bp, Homo sapiens; identical to SEQ ID NO: 819

SEQ ID NO: 1040 - DNA, 32767 bp, Homo sapiens; identical to SEQ ID NO: 819

SEQ ID NO: 1041 - DNA, 32767 bp, Homo sapiens; identical to SEQ ID NO: 819

SEQ ID NO: 1042 - DNA, 32767 bp, Homo sapiens; identical to SEQ ID NO: 819

SEQ ID NO: 1043 - DNA, 5917 bp, Homo sapiens
  misc_feature (251)..(251): second gene starts at position 251
atgttcagctttgtggacctccggctcctgctcctcttagcggccaccgccctcctgacgcacggccaagaggaaggccaagtcgagggccaagacgaagacatcccaccaatcacctgcgtacagaacggcctcaggtaccatgaccgagacgtgtggaaacccgagccctgccggatctgcgtctgcgacaacggcaaggtgttgtgcgatgacgtgatctgtgacgagaccaagaactgccccggcgccgaagtccccgagggcgagtgctgtcccgtctgccccgacggctcagagtcacccaccgaccaagaaaccaccggcgtcgagggacccaagggagacactggcccccgaggcccaaggggacccgcaggcccccctggccgagatggcatccctggacagcctggacttcccggaccccccggaccccccggacctcccggaccccctggcctcggaggaaactttgctccccagctgtcttatggctatgatgagaaatcaaccggaggaatttccgtgcctggccccatgggtccctctggtcctcgtggtctccctggcccccctggtgcacctggtccccaaggcttccaaggtccccctggtgagcctggcgagcctggagcttcaggtcccatgggtccccgaggtcccccaggtccccctggaaagaatggagatgatggggaagctggaaaacctggtcgtcctggtgagcgtgggcctcctgggcctcagggtgctcgaggattgcccggaacagctggcctccctggaatgaagggacacagaggtttcagtggtttggatggtgccaagggagatgctggtcctgctggtcctaagggtgagcctggcagccctggtgaaaatggagctcctggtcagatgggcccccgtggcctgcctggtgagagaggtcgccctggagcccctggccctgctggtgctcgtggaaatgatggtgctactggtgctgccgggccccctggtcccaccggccccgctggtcctcctggcttccctggtgctgttggtgctaagggtgaagctggtccccaagggccccgaggctctgaaggtccccagggtgtgcgtggtgagcctggcccccctggccctgctggtgctgctggccctgctggaaaccctggtgctgatggacagcctggtgctaaaggtgccaatggtgctcctggtattgctggtgctcctggcttccctggtgcccgaggcccctctggaccccagggccccggcggccctcctggtcccaagggtaacagcggtgaacctggtgctcctggcagcaaaggagacactggtgctaagggagagcctggccctgttggtgttcaaggaccccctggccctgctggagaggaaggaaagcgaggagctcgaggtgaacccggacccactggcctgcccggaccccctggcgagcgtggtggacctggtagccgtggtttccctggcgcagatggtgttgctggtcccaagggtcccgctggtgaacgtggttctcctggccctgctggccccaaaggatctcctggtgaagctggtcgtcccggtgaagctggtctgcctggtgccaagggtctgactggaagccctggcagccctggtcctgatggcaaaactggcccccctggtcccgccggtcaagatggtcgccccggacccccaggcccacctggtgcccgtggtcaggctggtgtgatgggattccctggacctaaaggtgctgctggagagcccggcaaggctggagagcgaggtgttcccggaccccctggcgctgtcggtcctgctggcaaagatggagaggctggagctcagggaccccctggccctgctggtcccgctggcgagagaggtgaacaaggccctgctggctcccccggattccagggtctccctggtcctgctggtcctccaggtgaagcaggcaaacctggtgaacagggtgttcctggagaccttggcgcccctggcccctctggagcaagaggcgagagaggtttccctggcgagcgtggtgtgcaaggtccccctggtcctgctggtccccgaggggccaacggtgctcccggcaacgatggtgctaagggtgatgctggtgcccctggagctcccggtagccagggcgcccctggccttcagggaatgcctggtgaacgtggtgcagctggtcttccagggcctaagggtgacagaggtgatgctggtcccaaaggtgctgatggctctcctggcaaagatggcgtccgtggtctgactggccccattggtcctcctggccctgctggtgcccctggtgacaagggtgaaagtggtcccagcggccctgctggtcccactggagctcgtggtgcccccggagaccgtggtgagcctggtccccccggccctgctggctttgctggcccccctggtgctgacggccaacctggtgctaaaggcgaacctggtgatgctggtgctaaaggcgatgctggtccccctggccctgccggacccgctggaccccctggccccattggtaatgttggtgctcctggagccaaaggtgctcgcggcagcgctggtccccctggtgctactggtttccctggtgctgctggccgagtcggtcctcctggcccctctggaaatgctggaccccctggccctcctggtcctgctggcaaagaaggcggcaaaggtccccgtggtgagactggccctgctggacgtcctggtgaagttggtccccctggtccccctggccctgctggcgagaaaggatcccctggtgctgatggtcctgctggtgctcctggtactcccgggcctcaaggtattgctggacagcgtggtgtggtcggcctgcctggtcagagaggagagagaggcttccctggtcttcctggcccctctggtgaacctggcaaacaaggtccctctggagcaagtggtgaacgtggtccccctggtcccatgggcccccctggattggctggaccccctggtgaatctggacgtgagggggctcctggtgccgaaggttcccctggacgagacggttctcctggcgccaagggtgaccgtggtgagaccggccccgctggaccccctggtgctcctggtgctcctggtgcccctggccccgttggccctgctggcaagagtggtgatcgtggtgagactggtcctgctggtcccaccggtcctgtcggccctgttggcgcccccccgggccgcccccggcccccattcgggccgggcctcgctgcggcggcgactgagccaggctgggccgcgtccctgagtcccagagtcggcgcggcgcggcaggggcagccttccaccacggggagcccagctgtcagccgcctcacaggaagatgctgcgtcggcggggcagccctggcatgggtgtgcatgtgggtgcagccctgggagcactgtggttctgcctcacaggagccctggaggtccaggtccctgaagacccagtggtggcactggtgggcaccgatgccaccctgtgctgctccttctcccctgagcctggcttcagcctggcacagctcaacctcatctggcagctgacagataccaaacagctggtgcacagctttgctgagggccaggaccagggcagcgcctatgccaaccgcacggccctcttcccggacctgctggcacagggcaacgcatccctgaggctgcagcgcgtgcgtgtggcggacgagggcagcttcacctgcttcgtgagcatccgggatttcggcagcgctgccgtcagcctgcaggtggccgctccctactcgaagcccagcatgaccctggagcccaacaaggacctgcggccaggggacacggtgaccatcacgtgctccagctaccggggctaccctgaggctgaggtgttctggcaggatgggcagggtgtgcccctgactggcaacgtgaccacgtcgcagatggccaacgagcagggcttgtttgatgtgcacagcgtcctgcgggtggtgctgggtgcgaatggcacctacagctgcctggtgcgcaaccccgtgctgcagcaggatgcgcacggctctgtcaccatcacagggcagcctatgacattccccccagaggccctgtgggtgaccgtggggctgtctgtctgtctcattgcactgctggtggccctggctttcgtgtgctggagaaagatcaaacagagctgtgaggaggagaatgcaggagctgaggaccaggatggggagggagaaggctccaagacagccctgcagcctctgaaacactctgacagcaaagaagatgatggacaagaaatagcctgaccatgaggaccagggagctgctacccctccctacagctcctaccctctggctgcaatggggctgcactgtgagccctgcccccaacagatgcatcctgctctgacaggtgggctccttctccaaaggatgcgatacacagaccactgtgcagccttatttctccaatggacatgattcccaagtcatcctgctgccttttttcttatagacacaatgaacagaccacccacaaccttagttctctaagtcatcctgcctgctgccttatttcacagtacatacatttcttagggacacagtacactgaccacatcaccaccctcttcttccagtgctgcgtggaccatctggctgccttttttctccaaaagatgcaatattcagactgactgaccccctgccttatttcaccaaagacacgatgcatagtcaccccggccttgtttctccaatggccgtgatacactagtgatcatgttcagccctgcttccacctgcatagaatcttttcttctcagacagggacagtgcggcctcaacatctcctggagtctagaagctgtttcctttcccctccttcctcctcttgctctagccttaatactggccttttccctccctgccccaagtgaagacagggcactctgcgcccaccacatgcacagctgtgcatggagacctgcaggtgcacgtgctggaacacgtgtggttcccccctggcccagcctcctctgcagtgcccctctcccctgcccatcctccccacggaagcatgtgctggtcacactggttctccaggggtctgtgatggggcccctgggggtcagcttctgtccctctgccttctcacctctttgttcctttcttttcatgtatccattcagttgatgtttattgagcaactacagatgtcagcactgtgttaggtgctgggggccctgcgtgggaagataaagttcctccctcaaggactccccatccagctgggagacagacaactaactacactgcaccctgcggtttgcagggggctcctgcctggctccctgctccacacctcctctgtggctcaaggcttcctggatacctcacccccatcccacccataattcttacccagagcatggggttggggcggaaacctggagagagggacatagcccctcgccacggctagagaatctggtggtgtccaaaatgtctgtccaggtgtgggcaggtgggcaggcaccaaggccctctggacctttcatagcagcagaaaaggcagagcctggggcagggcagggccaggaatgctttggggacaccgaggggactgccccccacccccaccatggtgctattctggggctggggcagtcttttcctggcttgcctctggccagctcctggcctctggtagagtgagacttcagacgttctgatgccttccggatgtcatctctccctgccccaggaatggaagatgtgaggacttctaatttaaatgtgggactcggagggattttgtaaactgggggtatattttggggaaaataaatgtctttgtaaaaagctt

SEQ ID NO: 1044 - DNA, 6571 bp, Homo sapiens
  misc_feature (251)..(251): second gene starts at position 251
atgttcagctttgtggacctccggctcctgctcctcttagcggccaccgccctcctgacgcacggccaagaggaaggccaagtcgagggccaagacgaagacatcccaccaatcacctgcgtacagaacggcctcaggtaccatgaccgagacgtgtggaaacccgagccctgccggatctgcgtctgcgacaacggcaaggtgttgtgcgatgacgtgatctgtgacgagaccaagaactgccccggcgccgaagtccccgagggcgagtgctgtcccgtctgccccgacggctcagagtcacccaccgaccaagaaaccaccggcgtcgagggacccaagggagacactggcccccgaggcccaaggggacccgcaggcccccctggccgagatggcatccctggacagcctggacttcccggaccccccggaccccccggacctcccggaccccctggcctcggaggaaactttgctccccagctgtcttatggctatgatgagaaatcaaccggaggaatttccgtgcctggccccatgggtccctctggtcctcgtggtctccctggcccccctggtgcacctggtccccaaggcttccaaggtccccctggtgagcctggcgagcctggagcttcaggtcccatgggtccccgaggtcccccaggtccccctggaaagaatggagatgatggggaagctggaaaacctggtcgtcctggtgagcgtgggcctcctgggcctcagggtgctcgaggattgcccggaacagctggcctccctggaatgaagggacacagaggtttcagtggtttggatggtgccaagggagatgctggtcctgctggtcctaagggtgagcctggcagccctggtgaaaatggagctcctggtcagatgggcccccgtggcctgcctggtgagagaggtcgccctggagcccctggccctgctggtgctcgtggaaatgatggtgctactggtgctgccgggccccctggtcccaccggccccgctggtcctcctggcttccctggtgctgttggtgctaagggtgaagctggtccccaagggccccgaggctctgaaggtccccagggtgtgcgtggtgagcctggcccccctggccctgctggtgctgctggccctgctggaaaccctggtgctgatggacagcctggtgctaaaggtgccaatggtgctcctggtattgctggtgctcctggcttccctggtgcccgaggcccctctggaccccagggccccggcggccctcctggtcccaagggtaacagcggtgaacctggtgctcctggcagcaaaggagacactggtgctaagggagagcctggccctgttggtgttcaaggaccccctggccctgctggagaggaaggaaagcgaggagctcgaggtgaacccggacccactggcctgcccggaccccctggcgagcgtggtggacctggtagccgtggtttccctggcgcagatggtgttgctggtcccaagggtcccgctggtgaacgtggttctcctggccctgctggccccaaaggatctcctggtgaagctggtcgtcccggtgaagctggtctgcctggtgccaagggtctgactggaagccctggcagccctggtcctgatggcaaaactggcccccctggtcccgccggtcaagatggtcgccccggacccccaggcccacctggtgcccgtggtcaggctggtgtgatgggattccctggacctaaaggtgctgctggagagcccggcaaggctggagagcgaggtgttcccggaccccctggcgctgtcggtcctgctggcaaagatggagaggctggagctcagggaccccctggccctgctggtcccgctggcgagagaggtgaacaaggccctgctggctcccccggattccagggtctccctggtcctgctggtcctccaggtgaagcaggcaaacctggtgaacagggtgttcctggagaccttggcgcccctggcccctctggagcaagaggcgagagaggtttccctggcgagcgtggtgtgcaaggtccccctggtcctgctggtccccgaggggccaacggtgctcccggcaacgatggtgctaagggtgatgctggtgcccctggagctcccggtagccagggcgcccctggccttcagggaatgcctggtgaacgtggtgcagctggtcttccagggcctaagggtgacagaggtgatgctggtcccaaaggtgctgatggctctcctggcaaagatggcgtccgtggtctgactggccccattggtcctcctggccctgctggtgcccctggtgacaagggtgaaagtggtcccagcggccctgctggtcccactggagctcgtggtgcccccggagaccgtggtgagcctggtccccccggccctgctggctttgctggcccccctggtgctgacggccaacctggtgctaaaggcgaacctggtgatgctggtgctaaaggcgatgctggtccccctggccctgccggacccgctggaccccctggccccattggtaatgttggtgctcctggagccaaaggtgctcgcggcagcgctggtccccctggtgctactggtttccctggtgctgctggccgagtcggtcctcctggcccctctggaaatgctggaccccctggccctcctggtcctgctggcaaagaaggcggcaaaggtccccgtggtgagactggccctgctggacgtcctggtgaagttggtccccctggtccccctggccctgctggcgagaaaggatcccctggtgctgatggtcctgctggtgctcctggtactcccgggcctcaaggtattgctggacagcgtggtgtggtcggcctgcctggtcagagaggagagagaggcttccctggtcttcctggcccctctggtgaacctggcaaacaaggtccctctggagcaagtggtgaacgtggtccccctggtcccatgggcccccctggattggctggaccccctggtgaatctggacgtgagggggctcctggtgccgaaggttcccctggacgagacggttctcctggcgccaagggtgaccgtggtgagaccggccccgctggaccccctggtgctcctggtgctcctggtgcccctggccccgttggccctgctggcaagagtggtgatcgtggtgagactggtcctgctggtcccaccggtcctgtcggccctgttggcgcccccccgggccgcccccggcccccattcgggccgggcctcgctgcggcggcgactgagccaggctgggccgcgtccctgagtcccagagtcggcgcggcgcggcaggggcagccttccaccacggggagcccagctgtcagccgcctcacaggaagatgctgcgtcggcggggcagccctggcatgggtgtgcatgtgggtgcagccctgggagcactgtggttctgcctcacaggagccctggaggtccaggtccctgaagacccagtggtggcactggtgggcaccgatgccaccctgtgctgctccttctcccctgagcctggcttcagcctggcacagctcaacctcatctggcagctgacagataccaaacagctggtgcacagctttgctgagggccaggaccagggcagcgcctatgccaaccgcacggccctcttcccggacctgctggcacagggcaacgcatccctgaggctgcagcgcgtgcgtgtggcggacgagggcagcttcacctgcttcgtgagcatccgggatttcggcagcgctgccgtcagcctgcaggtggccgctccctactcgaagcccagcatgaccctggagcccaacaaggacctgcggccaggggacacggtgaccatcacgtgctccagctaccagggctaccctgaggctgaggtgttctggcaggatgggcagggtgtgcccctgactggcaacgtgaccacgtcgcagatggccaacgagcagggcttgtttgatgtgcacagcatcctgcgggtggtgctgggtgcaaatggcacctacagctgcctggtgcgcaaccccgtgctgcagcaggatgcgcacagctctgtcaccatcacaccccagagaagccccacaggagccgtggaggtccaggtccctgaggacccggtggtggccctagtgggcaccgatgccaccctgcgctgctccttctcccccgagcctggcttcagcctggcacagctcaacctcatctggcagctgacagacaccaaacagctggtgcacagtttcaccgaaggccgggaccagggcagcgcctatgccaaccgcacggccctcttcccggacctgctggcacaaggcaatgcatccctgaggctgcagcgcgtgcgtgtggcggacgagggcagcttcacctgcttcgtgagcatccgggatttcggcagcgctgccgtcagcctgcaggtggccgctccctactcgaagcccagcatgaccctggagcccaacaaggacctgcggccaggggacacggtgaccatcacgtgctccagctaccggggctaccctgaggctgaggtgttctggcaggatgggcagggtgtgcccctgactggcaacgtgaccacgtcgcagatggccaacgagcagggcttgtttgatgtgcacagcgtcctgcgggtggtgctgggtgcgaatggcacctacagctgcctggtgcgcaaccccgtgctgcagcaggatgcgcacggctctgtcaccatcacagggcagcctatgacattccccccagaggccctgtgggtgaccgtggggctgtctgtctgtctcattgcactgctggtggccctggctttcgtgtgctggagaaagatcaaacagagctgtgaggaggagaatgcaggagctgaggaccaggatggggagggagaaggctccaagacagccctgcagcctctgaaacactctgacagcaaagaagatgatggacaagaaatagcctgaccatgaggaccagggagctgctacccctccctacagctcctaccctctggctgcaatggggctgcactgtgagccctgcccccaacagatgcatcctgctctgacaggtgggctccttctccaaaggatgcgatacacagaccactgtgcagccttatttctccaatggacatgattcccaagtcatcctgctgccttttttcttatagacacaatgaacagaccacccacaaccttagttctctaagtcatcctgcctgctgccttatttcacagtacatacatttcttagggacacagtacactgaccacatcaccaccctcttcttccagtgctgcgtggaccatctggctgccttttttctccaaaagatgcaatattcagactgactgaccccctgccttatttcaccaaagacacgatgcatagtcaccccggccttgtttctccaatggccgtgatacactagtgatcatgttcagccctgcttccacctgcatagaatcttttcttctcagacagggacagtgcggcctcaacatctcctggagtctagaagctgtttcctttcccctccttcctcctcttgctctagccttaatactggccttttccctccctgccccaagtgaagacagggcactctgcgcccaccacatgcacagctgtgcatggagacctgcaggtgcacgtgctggaacacgtgtggttcccccctggcccagcctcctctgcagtgcccctctcccctgcccatcctccccacggaagcatgtgctggtcacactggttctccaggggtctgtgatggggcccctgggggtcagcttctgtccctctgccttctcacctctttgttcctttcttttcatgtatccattcagttgatgtttattgagcaactacagatgtcagcactgtgttaggtgctgggggccctgcgtgggaagataaagttcctccctcaaggactccccatccagctgggagacagacaactaactacactgcaccctgcggtttgcagggggctcctgcctggctccctgctccacacctcctctgtggctcaaggcttcctggatacctcacccccatcccacccataattcttacccagagcatggggttggggcggaaacctggagagagggacatagcccctcgccacggctagagaatctggtggtgtccaaaatgtctgtccaggtgtgggcaggtgggcaggcaccaaggccctctggacctttcatagcagcagaaaaggcagagcctggggcagggcagggccaggaatgctttggggacaccgaggggactgccccccacccccaccatggtgctattctggggctggggcagtcttttcctggcttgcctctggccagctcctggcctctggtagagtgagacttcagacgttctgatgccttccggatgtcatctctccctgccccaggaatggaagatgtgaggacttctaatttaaatgtgggactcggagggattttgtaaactgggggtatattttggggaaaataaatgtctttgtaaaaagctt

SEQ ID NO: 1045 - DNA, 5917 bp, Homo sapiens; identical to SEQ ID NO: 1043
  misc_feature (251)..(251): second gene starts at position 251

SEQ ID NO: 1046 - DNA, 6571 bp, Homo sapiens; identical to SEQ ID NO: 1044
  misc_feature (251)..(251): second gene starts at position 251

SEQ ID NO: 1047 - DNA, 5519 bp, Homo sapiens
  misc_feature (753)..(753): second gene starts at position 753
atgagattgaccccgcgcgcgctgtgcagcgccgcccaggccgcctggcgggagaacttccccctgtgcggtcgcgacgtggcgcgctggttcccgggccacatggccaaggggctgaagaagatgcagagcagcctgaagctggtggactgtatcatcgaggtccacgatgcccggatcccactttcaggccgcaaccctctgtttcaggaaacccttgggcttaagcctcacttgctggtcctcaacaagatggacttggcggatcttacagagcagcagaaaattatgcaacacttagaaggagaaggcctaaaaaatgtcatttttaccaactgtgtaaaggatgaaaatgtcaagcagatcatcccgatggtcactgaactgattgggagaagccaccgctaccaccgaaaagagaacctggagtactgtatcatggtcattggggtccccaacgtgggcaagtcctccctcatcaactccctccggaggcagcacctcaggaaagggaaagccaccagggtgggtggcgagcctgggatcaccagagctgtgatgtccaaaattcaggtctctgagcggcccctgatgttcctgttggacactcctggcgtgctggctcctcggattgaaagtgtggagacaggcctgaagctggccctgtgtggaacggtgctggaccacctggtcggggaggagaccatggctgactacctgctgtacaccctcaacaaacaccagcgctttgggtggaccaggtgctctgaggctggcgtacagacacagcacgtgcgacggagtggtgttggtccgacaccacggggcatggggatacgtgtgcaaccaggagtggacgctggcagaggcctctgtcgtgtgcaggcagctgggctgcggccctgccgtgggcgcccccaagtatgtcccgctgcctggagagatggcccagccctggcttcacaacgtgtcctgccggggcaacgagtcctccctctgggagtgcagccttggctcatggtgccagagcccgtgcccccacgcatgggtggtggtcgcgctgtgctccaacggcactttccgggagctccggctggtgaagggccgcagtccctgcgcgggactccccgagatcagaaacgtgaatggggtggaccgcctctgtgtcctgcatgtggaggaggccatggtgttctgccgggagctggggtgcggccctgtgctccaggccccccgccgggacgtgggcgtcgtcaggaagtacctggcctgcaggggtaccgagcccaccatccgcagctgcagactggacaacaacttccgcagcggctgcgacctgcggctggacgcagaggtggtctgctcaggtgaggctgccacctgatgttcccagtgacccttgggatgatgctgggcccggacctggggagggcagggagaaggggggtgggcgttcccacggatgggcccccctgtcctgcatgagacattgggcgcagaggtgggaaagggcctcagctctcacgctggttctcagcagagtggagctgagtttctggtggccccacagaggtgtcctggctcagaacccgcaggccatctaggggtcctggctgccgctgcaagtctgagctgcctcagctgtgatctctgcatgtctaacatggatcggggttgggtagaggtcacttcttcccagccctgcctcaactgtgtgtgagctgcactggcctcacagctcctggccttgttgtgcatatgaggagcagctgaaatgaggtggatagtctgcctgctgcggtaccccagagagggtggtgctcagtggaccaaggggtgccctgacctcgcctctgggattgcagagggtgttgctgtcatggcctcggacaggcagaggctgtgaaatacgtgagcacctgcagcaggtgaccctgaccctgaccttggtgatgcggccaaggacgtctgctctgctctgggtgccgggtggaagggcctgtggctgcaagttcctgcctgtgcttggtagaccctctgcctagatgcaggtgatggctcctggctgaagccttccgcagtctgaggctcagggccaggctgttgacctgagaacacctgtctcctgcctgagaggacgtctgcccccaggacacaccgaggcccgactggtgggcggcgagcacccctgcgccgggcgcctggaggtgacctggggcaccgtctgtgatgcggccctggacctggccacggcccacgtggtgtgccgggagctgcagtgtggggcggtcgtgtccacgcccgagggcgcccgcttcggccggggctcggggccggtgtggacggaggccttccgctgtgcgggcaacgagtcgctgctgttccactgcccacgggggcgtgggagccagtgtgggcatggtcacgacgcggggctcaggtgctcaggtgaagtcctgtgtgtgggctctgaaggctcagccctgccttgttctctgtcaaatcccttcgtgccctaaaggtgcctctggccagtaggtgtgggtgcttttgatgtttgcttctgttggttgaaagaagcgcagggaagagactgggtgtagagtgatgtaccccaaggctgcagctaagatcaaattcttctggagagctgtgtgagctggatgctgatgcagaggagggtgggggagctggtgagaccaaggctgggctctgtgcccatcccactgggtgtgaaggaaggaaatgaccacagacagccatgttctgggtcggccgtctgcaagccaggctgactcctcctctcccccagagttcaggatggtcaacggcagcagcagctgtgagggccgcgtggagttccaggtgcaggggtcctgggcacccctctgtgccacccactgggacatagcagatgccaccgtcctctgccaccagctcaactgtggcaacgcggtggccgcacctggaggaggccattttggggacggggacgctgccatctggcctgatgcctttcactgtgaggggacagagtcctacttgtggaattgcccagtaagcaccctgggggccccggcctgtgccccgggaaacacagcctccgcggtctgctcaggtctggcccacgccctgcgactgagggaaggacagagccgctgtgacggccgcgtggaggtctccctggatggcgtgtggggccgcgtcctggacgatgcctgggacctgcgcggcgcgggcgtggtgtgccggcaactcgggtgcagaggggcccagcaagcctatgacgcacctgcccccagccgcggatccgtccaggtggcgctgagccgcgtgcgctgtctgggcaccgaaacccgcctgactcagtgcaacgtgtccgcgaccctgcaggagcccgcggggacctcgcgggacgccggcgtggtgtgctccgggagcctcagggtgcggctggccgcggggccggggcgctgcacgggggcgcgtggggcaccgtgtgtgacgatgcctgggacctgcgggacgcgcacgtggtctgcaggcagctgggctgtggccgcgccctgagcgccctgggggccgcacacttcggagccggggcagggcgcatctggctggacgagctgggctgccagggccacgagtctgcgctgtggcagtgcccgtcggcgggctgggggcggcacgactggaggcacaaggaggacgccggcgtcttctgctcagagtcggtggctctgaggctgcgaggtgggacctgctgctgtgctgggtggctggacgtgttctacaatgggacctggggcgccatgtgcagcaatgccctgaaggacctctccttgtccatcatctgcaagcagctggggtgtggggtgtggggagtggggctggctggagaacaggcccttcccctctgcgggcaccgggaccgcctgggtggacaacatcgagtgccgcaggctgcccaactccactctgtggcaatgcccttcccacccatggcacccgcactcttgcgaccttcgagagcaggtctggattacctgtgcaggtgggcattagaggtctctgggggtgcctgggaagaggtttatctgtcctgacaggtcacttacaggggatgccattcaatcagagcctgggcctgggggtcactaggatccacagccttccttgtgaagcttctctgggcaccgaagctctcagagctgctgtttaacccgcaggattgtcagaggacaggccacaggctgctggggagcccctcaactgctcctcctggctcggctgcccagaggagggcgcactgcgcgtgcgcgggggcgaggaccgctgctccgggcgcgtggagctctggcacgcgggctcctggggcaccgtgtgcgacgatggctgggacctggcggacgcggaggtcgtgtgccgccagctgggctgtggtcgggccgtcgccgccctgggggccgccgcctttggccctggctccgggcccgtgtggctggacgaggtggggtgccggggcagcgaggcgtccctgtggggctgccctgcggagcggtggggacgcggagaccgcgcgcacgaggaggacgcgggcgtgcgctgctgggagcctggcccaggccccccactgcctgcagctcccttccggacattctgggtggtcagtgtcgtcctgggatcccttcttggtcttctccttctgggcctcatggcttttctgattctgcctcgagtcacacaagccatgcagaggggtctgggaagatccgaggtatctcctggagaagccatctatgatgtcattggggaaatgccgccagcaggactgtacgaggaaatcatggaggccgaggctgtgctccaagatgaggaggacggaagtgtggtgaaggtggacacagaagccgcagtttcaggggaggtgtctaacctcctggagggacagtctatacgtgcggagggaggacacagcagacctgtttctcagggatatgacgaggctgcgtttcctctggaggagatgacgttgtaaagcaacctgaggatgagatacaccagctggctgtcgaaatcacagctcttcattttcttgtacaattgtagtggatttcgtgagaacaccttggatgcctttctcttgcaatgtcctccatgtccatgtaaaatccagtccttccaggccctgcctggctctaaacctcatccccttcgagggccatctgctgtggacagttgtgctgtgtaaccttcagatttcccacacattacagcaaatgcaaatacacatagaaatcagtggttccatttgtggtttagagacacatggtgccatcttcatcttccgctccacagctcgcttctggcacccagcagtgggttgcagagctccccatgccagaaccttcctcttttttcttaaaaactcttcttaattgaatccaaagtatcttttaaatgttctacttgtgtaatcatgtcatctgtgaatattcagatttatcttctccttccaa

SEQ ID NO: 1048 - DNA, 5519 bp, Homo sapiens; identical to SEQ ID NO: 1047
  misc_feature (753)..(753): second gene starts at position 753

SEQ ID NO: 1049 - DNA, 5519 bp, Homo sapiens; identical to SEQ ID NO: 1047
  misc_feature (753)..(753): second gene starts at position 753

SEQ ID NO: 1050 - DNA, 11121 bp, Homo sapiens
  misc_feature (131)..(131): second gene starts at position 131
atggccccacactgggctgtctggctgctggcagcaaggctgtggggcctgggcattggggctgaggtgtggtggaaccttgtgccgcgtaagacagtgtcttctggggagctggccacggtagtacggcggttctcccagaccggcatccaggacttcctgacactgacgctgacggagcccactgggcttctgtacgtgggcgcccgagaggccctgtttgccttcagcatggaggccctggagctgcaaggagcgatctcctgggaggcccccgtggagaagaagactgagtgtatccagaaagggaagaacaaccagaccgagtgcttcaacttcatccgcttcctgcagccctacaatgcctcccacctgtacgtctgtggcacctacgccttccagcccaagtgcacctacgtcaacatgctcaccttcactttggagcatggagagtttgaagatgggaagggcaagtgtccctatgacccagctaagggccatgctggccttcttgtggatggtgagctgtactcggccacactcaacaacttcctgggcacggaacccattatcctgcgtaacatggggccccaccactccatgaagacagagtacctggccttttggctcaacgaacctcactttgtaggctctgcctatgtacctgagagtgtgggcagcttcacgggggacgacgacaaggtctacttcttcttcagggagcgggcagtggagtccgactgctatgccgagcaggtggtggctcgtgtggcccgtgtctgcaagggcgatatggggggcgcacggaccctgcagaggaagtggaccacgttcctgaaggcgcggctggcatgctctgccccgaactggcagctctacttcaaccagctgcaggcgatgcacaccctgcaggacacctcctggcacaacaccaccttctttggggtttttcaagcacagtggggtgacatgtacctgtcggccatctgtgagtaccagttggaagagatccagcgggtgtttgagggcccctataaggagtaccatgaggaagcccagaagtgggaccgctacactgaccctgtacccagccctcggcctggctcgtgcattaacaactggcatcggcgccacggctacaccagctccctggagctacccgacaacatcctcaacttcgtcaagaagcacccgctgatggaggagcaggtggggcctcggtggagccgccccctgctcgtgaagaagggcaccaacttcacccacctggtggccgaccgggttacaggacttgatggagccacctatacagtgctgttcattggcacaggagacggctggctgctcaaggctgtgagcctggggccctgggttcacctgattgaggagctgcagctgtttgaccaggagcccatgagaagcctggtgctatctcagagcaagaagctgctctttgccggctcccgctctcagctggtgcagctgcccgtggccgactgcatgaagtatcgctcctgtgcagactgtgtcctcgcccgggacccctattgcgcctggagcgtcaacaccagccgctgtgtggccgtgggtggccactctggatctctactgatccagcatgtgatgacctcggacacttcaggcatctgcaacctccgtggcagtaagaaagtcaggcccactcccaaaaacatcacggtggtggcgggcacagacctggtgctgccctgccacctctcctccaacttggcccatgcccgctggacctttgggggccgggacctgcctgcggaacagcccgggtccttcctctacgatgcccggctccaggccctggttgtgatggctgcccagccccgccatgccggggcctaccactgcttttcagaggagcagggggcgcggctggctgctgaaggctaccttgtggctgtcgtggcaggcccgtcggtgaccttggaggcccgggcccccctggaaaacctggggctggtgtggctggcggtggtggccctgggggctgtgtgcctggtgctgctgctgctggtgctgtcattgcgccggcggctgcgggaagagctggagaaaggggccaaggctactgagaggaccttggtgtaccccctggagggctccttgggcagcaagaagggtgtgaaccttcctggggctgctgtggacttgcctgctgtgtcggagaaggacatccaggatctgaagtttggggtcgagcaggatgttgatatggtgtttgcgtcattcatccgcaaggcatctgatgtccatgaagttaggaaggtcctgggagagaagggaaagaacatcaagattatcagcaaaatcgagaatcatgagggggttcggaggtttgatgaaatcctggaggccagtgatgggatcatggtggctcgtggtgatctaggcattgagattcctgcagagaaggtcttccttgctcagaagatgatgattggacggtgcaaccgagctgggaagcctgtcatctgtgctactcagatgctggagagcatgatcaagaagccccgccccactcgggctgaaggcagtgatgtggccaatgcagtcctggatggagccgactgcatcatgctgtctggagaaacagccaaaggggactatcctctggaggctgtgcgcatgcagcacctgattgcccgtgaggcagaggctgccatctaccacttgcaattatttgaggaactccgccgcctggcgcccattaccagcgaccccacagaagccaccgccgtgggtgccgtggaggcctccttcaagtgctgcagtggggccataatcgtcctcaccaagtctggcaggtctgctcaccaggtggccagataccgcccacgtgcccccatcattgctgtgacccggaatccccagacagctcgtcaggcccacctgtaccgtggcatcttccctgtgctgtgcaaggacccagtccaggaggcctgggctgaggacgtggacctccgggtgaactttgccatgaatgttggcaaggcccgaggcttcttcaagaagggagatgtggtcattgtgctgaccggatggcgccctggctccggcttcaccaacaccatgcgtgttgttcctgtgccgtgatggaccccagagcccctcctccagcccctgtcccacccccttcccccagcccatccattaggccagcaacgcttgtagaactcactctgggctgtaacgtggcactggtaggttgggacaccagggaagaagatcaacgcctcactgaaacatggctgtgtttgcagcctgctctagtgggacagcccagagcctggctgcccatcatgtggccccacccaatcaagggaagaaggaggaatgctggactggaggcccctggagccagatggcaagagggtgacagcttcctttcctgtgtgtactctgtccagttcctttagaaaaaatggatgcccagaggactcccaaccctggcttggggtcaagaaacagccagcaagagttaggggccttagggcactgggctgttgttccattgaagccgactctggccctggcccttacttgcttctctagctctctaggcctctccagtttgcacctgtccccaccctccactcagctgtcctgcagcaaacactccaccctccaccttccattttcccccactactgcagcacctccaggcctgttgctatagagcctacctgtatgtcaataaacaacagctgaagcacccgccgcgcttcctcctgaaggtgactgcgcccgcggggacgcagggggcggggcccgggtcgcccggagccgggattgggcagagggcggggcggcggagggattgcggcggcccgcagcgggataaccttgaggctgaggcagtggctccttgcacagcagctgcacgcgccgtggctccggatctcttcgtctttgcagcgtagcccgagtcggtcagcgccggaggacctcagcagccatgtcgaagccccatagtgaagccgggactgccttcattcagacccagcagctgcacgcagccatggctgacacattcctggagcacatgtgccgcctggacattgattcaccacccatcacagcccggaacactggcatcatctgtaccattggcccagcttcccgatcagtggagacgttgaaggagatgattaagtctggaatgaatgtggctcgtctgaacttctctcatggaactcatgagtaccatgcggagaccatcaagaatgtgcgcacagccacggaaagctttgcttctgaccccatcctctaccggcccgttgctgtggctctagacactaaaggacctgagatccgaactgggctcatcaagggcagcggcactgcagaggtggagctgaagaagggagccactctcaaaatcacgctggataacgcctacatggaaaagtgtgacgagaacatcctgtggctggactacaagaacatctgcaaggtggtggaagtgggcagcaagatctacgtggatgatgggcttatttctctccaggtgaagcagaaaggtgccgacttcctggtgacggaggtggaaaatggtggctccttgggcagcaagaagggtgtgaaccttcctggggctgctgtggacttgcctgctgtgtcggagaaggacatccaggatctgaagtttggggtcgagcaggatgttgatatggtgtttgcgtcattcatccgcaaggcatctgatgtccatgaagttaggaaggtcctgggagagaagggaaagaacatcaagattatcagcaaaatcgagaatcatgagggggttcggaggtttgatgaaatcctggaggccagtgatgggatcatggtggctcgtggtgatctaggcattgagattcctgcagagaaggtcttccttgctcagaagatgatgattggacggtgcaaccgagctgggaagcctgtcatctgtgctactcagatgctggagagcatgatcaagaagccccgccccactcgggctgaaggcagtgatgtggccaatgcagtcctggatggagccgactgcatcatgctgtctggagaaacagccaaaggggactatcctctggaggctgtgcgcatgcagcacctgattgcccgtgaggcagaggctgccatctaccacttgcaattatttgaggaactccgccgcctggcgcccattaccagcgaccccacagaagccaccgccgtgggtgccgtggaggcctccttcaagtgctgcagtggggccataatcgtcctcaccaagtctggcaggtctgctcaccaggtggccagataccgcccacgtgcccccatcattgctgtgacccggaatccccagacagctcgtcaggcccacctgtaccgtggcatcttccctgtgctgtgcaaggacccagtccaggaggcctgggctgaggacgtggacctccgggtgaactttgccatgaatgttggcaaggcccgaggcttcttcaagaagggagatgtggtcattgtgctgaccggatggcgccctggctccggcttcaccaacaccatgcgtgttgttcctgtgccgtgatggaccccagagcccctcctccagcccctgtcccacccccttcccccagcccatccattaggccagcaacgcttgtagaactcactctgggctgtaacgtggcactggtaggttgggacaccagggaagaagatcaacgcctcactgaaacatggctgtgtttgcagcctgctctagtgggacagcccagagcctggctgcccatcatgtggccccacccaatcaagggaagaaggaggaatgctggactggaggcccctggagccagatggcaagagggtgacagcttcctttcctgtgtgtactctgtccagttcctttagaaaaaatggatgcccagaggactcccaaccctggcttggggtcaagaaacagccagcaagagttaggggccttagggcactgggctgttgttccattgaagccgactctggccctggcccttacttgcttctctagctctctaggcctctccagtttgcacctgtccccaccctccactcagctgtcctgcagcaaacactccaccctccaccttccattttcccccactactgcagcacctccaggcctgttgctatagagcctacctgtatgtcaataaacaacagctgaagcacccgccgcgcttcctcctgaaggtgactgcgcccgcggggacgcagggggcggggcccgggtcgcccggagccgggattgggcagagggcggggcggcggagggattgcggcggcccgcagcgggataaccttgaggctgaggcagtggctccttgcacagcagctgcacgcgccgtggctccggatctcttcgtctttgcagcgtagcccgagtcggtcagcgccggaggacctcagcagccatgtcgaagccccatagtgaagccgggactgccttcattcagacccagcagctgcacgcagccatggctgacacattcctggagcacatgtgccgcctggacattgattcaccacccatcacagcccggaacactggcatcatctgtaccattggcccagcttcccgatcagtggagacgttgaaggagatgattaagtctggaatgaatgtggctcgtctgaacttctctcatggaactcatgagtaccatgcggagaccatcaagaatgtgcgcacagccacggaaagctttgcttctgaccccatcctctaccggcccgttgctgtggctctagacactaaaggacctgagatccgaactgggctcatcaagggcagcggcactgcagaggtggagctgaagaagggagccactctcaaaatcacgctggataacgcctacatggaaaagtgtgacgagaacatcctgtggctggactacaagaacatctgcaaggtggtggaagtgggcagcaagatctacgtggatgatgggcttatttctctccaggtgaagcagaaaggtgccgacttcctggtgacggaggtggaaaatggtggctccttgggcagcaagaagggtgtgaaccttcctggggctgctgtggacttgcctgctgtgtcggagaaggacatccaggatctgaagtttggggtcgagcaggatgttgatatggtgtttgcgtcattcatccgcaaggcatctgatgtccatgaagttaggaaggtcctgggagagaagggaaagaacatcaagattatcagcaaaatcgagaatcatgagggggttcggaggtttgatgaaatcctggaggccagtgatgggatcatggtggctcgtggtgatctaggcattgagattcctgcagagaaggtcttccttgctcagaagatgatgattggacggtgcaaccgagctgggaagcctgtcatctgtgctactcagatgctggagagcatgatcaagaagccccgccccactcgggctgaaggcagtgatgtggccaatgcagtcctggatggagccgactgcatcatgctgtctggagaaacagccaaaggggactatcctctggaggctgtgcgcatgcagcacctgattgcccgtgaggcagaggctgccatctaccacttgcaattatttgaggaactccgccgcctggcgcccattaccagcgaccccacagaagccaccgccgtgggtgccgtggaggcctccttcaagtgctgcagtggggccataatcgtcctcaccaagtctggcaggtctgctcaccaggtggccagataccgcccacgtgcccccatcattgctgtgacccggaatccccagacagctcgtcaggcccacctgtaccgtggcatcttccctgtgctgtgcaaggacccagtccaggaggcctgggctgaggacgtggacctccgggtgaactttgccatgaatgttggcaaggcccgaggcttcttcaagaagggagatgtggtcattgtgctgaccggatggcgccctggctccggcttcaccaacaccatgcgtgttgttcctgtgccgtgatggaccccagagcccctcctccagcccctgtcccacccccttcccccagcccatccattaggccagcaacgcttgtagaactcactctgggctgtaacgtggcactggtaggttgggacaccagggaagaagatcaacgcctcactgaaacatggctgtgtttgcagcctgctctagtgggacagcccagagcctggctgcccatcatgtggccccacccaatcaagggaagaaggaggaatgctggactggaggcccctggagccagatggcaagagggtgacagcttcctttcctgtgtgtactctgtccagttcctttagaaaaaatggatgcccagaggactcccaaccctggcttggggtcaagaaacagccagcaagagttaggggccttagggcactgggctgttgttccattgaagccgactctggccctggcccttacttgcttctctagctctctaggcctctccagtttgcacctgtccccaccctccactcagctgtcctgcagcaaacactccaccctccaccttccattttcccccactactgcagcacctccaggcctgttgctatagagcctacctgtatgtcaataaacaacagctgaagcacccgccgcgcttcctcctgaaggtgactgcgcccgcggggacgcagggggcggggcccgggtcgcccggagccgggattgggcagagggcggggcggcggagggattgcggcggcccgcagcgggataaccttgaggctgaggcagtggctccttgcacagcagctgcacgcgccgtggctccggatctcttcgtctttgcagcgtagcccgagtcggtcagcgccggaggacctcagcagccatgtcgaagccccatagtgaagccgggactgccttcattcagacccagcagctgcacgcagccatggctgacacattcctggagcacatgtgccgcctggacattgattcaccacccatcacagcccggaacactggcatcatctgtaccattggcccagcttcccgatcagtggagacgttgaaggagatgattaagtctggaatgaatgtggctcgtctgaacttctctcatggaactcatgagtaccatgcggagaccatcaagaatgtgcgcacagccacggaaagctttgcttctgaccccatcctctaccggcccgttgctgtggctctagacactaaaggacctgagatccgaactgggctcatcaagggcagcggcactgcagaggtggagctgaagaagggagccactctcaaaatcacgctggataacgcctacatggaaaagtgtgacgagaacatcctgtggctggactacaagaacatctgcaaggtggtggaagtgggcagcaagatctacgtggatgatgggcttatttctctccaggtgaagcagaaaggtgccgacttcctggtgacggaggtggaaaatggtggctccttgggcagcaagaagggtgtgaaccttcctggggctgctgtggacttgcctgctgtgtcggagaaggacatccaggatctgaagtttggggtcgagcaggatgttgatatggtgtttgcgtcattcatccgcaaggcatctgatgtccatgaagttaggaaggtcctgggagagaagggaaagaacatcaagattatcagcaaaatcgagaatcatgagggggttcggaggtttgatgaaatcctggaggccagtgatgggatcatggtggctcgtggtgatctaggcattgagattcctgcagagaaggtcttccttgctcagaagatgatgattggacggtgcaaccgagctgggaagcctgtcatctgtgctactcagatgctggagagcatgatcaagaagccccgccccactcgggctgaaggcagtgatgtggccaatgcagtcctggatggagccgactgcatcatgctgtctggagaaacagccaaaggggactatcctctggaggctgtgcgcatgcagcacctgattgcccgtgaggcagaggctgccatctaccacttgcaattatttgaggaactccgccgcctggcgcccattaccagcgaccccacagaagccaccgccgtgggtgccgtggaggcctccttcaagtgctgcagtggggccataatcgtcctcaccaagtctggcaggtctgctcaccaggtggccagataccgcccacgtgcccccatcattgctgtgacccggaatccccagacagctcgtcaggcccacctgtaccgtggcatcttccctgtgctgtgcaaggacccagtccaggaggcctgggctgaggacgtggacctccgggtgaactttgccatgaatgttggcaaggcccgaggcttcttcaagaagggagatgtggtcattgtgctgaccggatggcgccctggctccggcttcaccaacaccatgcgtgttgttcctgtgccgtgatggaccccagagcccctcctccagcccctgtcccacccccttcccccagcccatccattaggccagcaacgcttgtagaactcactctgggctgtaacgtggcactggtaggttgggacaccagggaagaagatcaacgcctcactgaaacatggctgtgtttgcagcctgctctagtgggacagcccagagcctggctgcccatcatgtggccccacccaatcaagggaagaaggaggaatgctggactggaggcccctggagccagatggcaagagggtgacagcttcctttcctgtgtgtactctgtccagttcctttagaaaaaatggatgcccagaggactcccaaccctggcttggggtcaagaaacagccagcaagagttaggggccttagggcactgggctgttgttccattgaagccgactctggccctggcccttacttgcttctctagctctctaggcctctccagtttgcacctgtccccaccctccactcagctgtcctgcagcaaacactccaccctccaccttccattttcccccactactgcagcacctccaggcctgttgctatagagcctacctgtatgtcaataaacaacagctgaagcacc

SEQ ID NO: 1051 - DNA, 11121 bp, Homo sapiens
  misc_feature (131)..(131): second gene starts at position 131
atggccccacactgggctgtctggctgctggcagcaaggctgtggggcctgggcattggggctgaggtgtggtggaaccttgtgccgcgtaagacagtgtcttctggggagctggccacggtagtacggcggttctcccagaccggcatccaggacttcctgacactgacgctgacggagcccactgggcttctgtacgtgggcgcccgagaggccctgtttgccttcagcatggaggccctggagctgcaaggagcgatctcctgggaggcccccgtggagaagaagactgagtgtatccagaaagggaagaacaaccagaccgagtgcttcaacttcatccgcttcctgcagccctacaatgcctcccacctgtacgtctgtggcacctacgccttccagcccaagtgcacctacgtcaacatgctcaccttcactttggagcatggagagtttgaagatgggaagggcaagtgtccctatgacccagctaagggccatgctggccttcttgtggatggtgagctgtactcggccacactcaacaacttcctgggcacggaacccattatcctgcgtaacatggggccccaccactccatgaagacagagtacctggccttttggctcaacgaacctcactttgtaggctctgcctatgtacctgagagtgtgggcagcttcacgggggacgacgacaaggtctacttcttcttcagggagcgggcagtggagtccgactgctatgccgagcaggtggtggctcgtgtggcccgtgtctgcaagggcgatatggggggcgcacggaccctgcagaggaagtggaccacgttcctgaaggcgcggctggcatgctctgccccgaactggcagctctacttcaaccagctgcaggcgatgcacaccctgcaggacacctcctggcacaacaccaccttctttggggtttttcaagcacagtggggtgacatgtacctgtcggccatctgtgagtaccagttggaagagatccagcgggtgtttgagggcccctataaggagtaccatgaggaagcccagaagtgggaccgctacactgaccctgtacccagccctcggcctggctcgtgcattaacaactggcatcggcgccacggctacaccagctccctggagctacccgacaacatcctcaacttcgtcaagaagcacccgctgatggaggagcaggtggggcctcggtggagccgccccctgctcgtgaagaagggcaccaacttcacccacctggtggccgaccgggttacaggacttgatggagccacctatacagtgctgttcattggcacaggagacggctggctgctcaaggctgtgagcctggggccctgggttcacctgattgaggagctgcagctgtttgaccaggagcccatgagaagcctggtgctatctcagagcaagaagctgctctttgccggctcccgctctcagctggtgcagctgcccgtggccgactgcatgaagtatcgctcctgtgcagactgtgtcctcgcccgggacccctattgcgcctggagcgtcaacaccagccgctgtgtggccgtgggtggccactctggatctctactgatccagcatgtgatgacctcggacacttcaggcatctgcaacctccgtggcagtaagaaagtcaggcccactcccaaaaacatcacggtggtggcgggcacagacctggtgctgccctgccacctctcctccaacttggcccatgcccgctggacctttgggggccgggacctgcctgcggaacagcccgggtccttcctctacgatgcccggctccaggccctggttgtgatggctgcccagccccgccatgccggggcctaccactgcttttcagaggagcagggggcgcggctggctgctgaaggctaccttgtggctgtcgtggcaggcccgtcggtgaccttggaggcccgggcccccctggaaaacctggggctggtgtggctggcggtggtggccctgggggctgtgtgcctggtgctgctgctgctggtgctgtcattgcgccggcggctgcgggaagagctggagaaaggggccaaggctactgagaggaccttggtgtaccccctggagggctccttgggcagcaagaagggtgtgaaccttcctggggctgctgtggacttgcctgctgtgtcggagaaggacatccaggatctgaagtttggggtcgagcaggatgttgatatggtgtttgcgtcattcatccgcaaggcatctgatgtccatgaagttaggaaggtcctgggagagaagggaaagaacatcaagattatcagcaaaatcgagaatcatgagggggttcggaggtttgatgaaatcctggaggccagtgatgggatcatggtggctcgtggtgatctaggcattgagattcctgcagagaaggtcttccttgctcagaagatgatgattggacggtgcaaccgagctgggaagcctgtcatctgtgctactcagatgctggagagcatgatcaagaagccccgccccactcgggctgaaggcagtgatgtggccaatgcagtcctggatggagccgactgcatcatgctgtctggagaaacagccaaaggggactatcctctggaggctgtgcgcatgcagcacctgatagctcgtgaggctgaggcagccatgttccaccgcaagctgtttgaagaacttgtgcgagcctcaagtcactccacagacctcatggaagccatggccatgggcagcgtggaggcttcttataagtgtttagcagcagctttgatagttctgacggagtctggcaggtctgctcaccaggtggccagataccgcccacgtgcccccatcattgctgtgacccggaatccccagacagctcgtcaggcccacctgtaccgtggcatcttccctgtgctgtgcaaggacccagtccaggaggcctgggctgaggacgtggacctccgggtgaactttgccatgaatgttggcaaggcccgaggcttcttcaagaagggagatgtggtcattgtgctgaccggatggcgccctggctccggcttcaccaacaccatgcgtgttgttcctgtgccgtgatggaccccagagcccctcctccagcccctgtcccacccccttcccccagcccatccattaggccagcaacgcttgtagaactcactctgggctgtaacgtggcactggtaggttgggacaccagggaagaagatcaacgcctcactgaaacatggctgtgtttgcagcctgctctagtgggacagcccagagcctggctgcccatcatgtggccccacccaatcaagggaagaaggaggaatgctggactggaggcccctggagccagatggcaagagggtgacagcttcctttcctgtgtgtactctgtccagttcctttagaaaaaatggatgcccagaggactcccaaccctggcttggggtcaagaaacagccagcaagagttaggggccttagggcactgggctgttgttccattgaagccgactctggccctggcccttacttgcttctctagctctctaggcctctccagtttgcacctgtccccaccctccactcagctgtcctgcagcaaacactccaccctccaccttccattttcccccactactgcagcacctccaggcctgttgctatagagcctacctgtatgtcaataaacaacagctgaagcacccgccgcgcttcctcctgaaggtgactgcgcccgcggggacgcagggggcggggcccgggtcgcccggagccgggattgggcagagggcggggcggcggagggattgcggcggcccgcagcgggataaccttgaggctgaggcagtggctccttgcacagcagctgcacgcgccgtggctccggatctcttcgtctttgcagcgtagcccgagtcggtcagcgccggaggacctcagcagccatgtcgaagccccatagtgaagccgggactgccttcattcagacccagcagctgcacgcagccatggctgacacattcctggagcacatgtgccgcctggacattgattcaccacccatcacagcccggaacactggcatcatctgtaccattggcccagcttcccgatcagtggagacgttgaaggagatgattaagtctggaatgaatgtggctcgtctgaacttctctcatggaactcatgagtaccatgcggagaccatcaagaatgtgcgcacagccacggaaagctttgcttctgaccccatcctctaccggcccgttgctgtggctctagacactaaaggacctgagatccgaactgggctcatcaagggcagcggcactgcagaggtggagctgaagaagggagccactctcaaaatcacgctggataacgcctacatggaaaagtgtgacgagaacatcctgtggctggactacaagaacatctgcaaggtggtggaagtgggcagcaagatctacgtggatgatgggcttatttctctccaggtgaagcagaaaggtgccgacttcctggtgacggaggtggaaaatggtggctccttgggcagcaagaagggtgtgaaccttcctggggctgctgtggacttgcctgctgtgtcggagaaggacatccaggatctgaagtttggggtcgagcaggatgttgatatggtgtttgcgtcattcatccgcaaggcatctgatgtccatgaagttaggaaggtcctgggagagaagggaaagaacatcaagattatcagcaaaatcgagaatcatgagggggttcggaggtttgatgaaatcctggaggccagtgatgggatcatggtggctcgtggtgatctaggcattgagattcctgcagagaaggtcttccttgctcagaagatgatgattggacggtgcaaccgagctgggaagcctgtcatctgtgctactcagatgctggagagcatgatcaagaagccccgccccactcgggctgaaggcagtgatgtggccaatgcagtcctggatggagccgactgcatcatgctgtctggagaaacagccaaaggggactatcctctggaggctgtgcgcatgcagcacctgatagctcgtgaggctgaggcagccatgttccaccgcaagctgtttgaagaacttgtgcgagcctcaagtcactccacagacctcatggaagccatggccatgggcagcgtggaggcttcttataagtgtttagcagcagctttgatagttctgacggagtctggcaggtctgctcaccaggtggccagataccgcccacgtgcccccatcattgctgtgacccggaatccccagacagctcgtcaggcccacctgtaccgtggcatcttccctgtgctgtgcaaggacccagtccaggaggcctgggctgaggacgtggacctccgggtgaactttgccatgaatgttggcaaggcccgaggcttcttcaagaagggagatgtggtcattgtgctgaccggatggcgccctggctccggcttcaccaacaccatgcgtgttgttcctgtgccgtgatggaccccagagcccctcctccagcccctgtcccacccccttcccccagcccatccattaggccagcaacgcttgtagaactcactctgggctgtaacgtggcactggtaggttgggacaccagggaagaagatcaacgcctcactgaaacatggctgtgtttgcagcctgctctagtgggacagcccagagcctggctgcccatcatgtggccccacccaatcaagggaagaaggaggaatgctggactggaggcccctggagccagatggcaagagggtgacagcttcctttcctgtgtgtactctgtccagttcctttagaaaaaatggatgcccagaggactcccaaccctggcttggggtcaagaaacagccagcaagagttaggggccttagggcactgggctgttgttccattgaagccgactctggccctggcccttacttgcttctctagctctctaggcctctccagtttgcacctgtccccaccctccactcagctgtcctgcagcaaacactccaccctccaccttccattttcccccactactgcagcacctccaggcctgttgctatagagcctacctgtatgtcaataaacaacagctgaagcacccgccgcgcttcctcctgaaggtgactgcgcccgcggggacgcagggggcggggcccgggtcgcccggagccgggattgggcagagggcggggcggcggagggattgcggcggcccgcagcgggataaccttgaggctgaggcagtggctccttgcacagcagctgcacgcgccgtggctccggatctcttcgtctttgcagcgtagcccgagtcggtcagcgccggaggacctcagcagccatgtcgaagccccatagtgaagccgggactgccttcattcagacccagcagctgcacgcagccatggctgacacattcctggagcacatgtgccgcctggacattgattcaccacccatcacagcccggaacactggcatcatctgtaccattggcccagcttcccgatcagtggagacgttgaaggagatgattaagtctggaatgaatgtggctcgtctgaacttctctcatggaactcatgagtaccatgcggagaccatcaagaatgtgcgcacagccacggaaagctttgcttctgaccccatcctctaccggcccgttgctgtggctctagacactaaaggacctgagatccgaactgggctcatcaagggcagcggcactgcagaggtggagctgaagaagggagccactctcaaaatcacgctggataacgcctacatggaaaagtgtgacgagaacatcctgtggctggactacaagaacatctgcaaggtggtggaagtgggcagcaagatctacgtggatgatgggcttatttctctccaggtgaagcagaaaggtgccgacttcctggtgacggaggtggaaaatggtggctccttgggcagcaagaagggtgtgaaccttcctggggctgctgtggacttgcctgctgtgtcggagaaggacatccaggatctgaagtttggggtcgagcaggatgttgatatggtgtttgcgtcattcatccgcaaggcatctgatgtccatgaagttaggaaggtcctgggagagaagggaaagaacatcaagattatcagcaaaatcgagaatcatgagggggttcggaggtttgatgaaatcctggaggccagtgatgggatcatggtggctcgtggtgatctaggcattgagattcctgcagagaaggtcttccttgctcagaagatgatgattggacggtgcaaccgagctgggaagcctgtcatctgtgctactcagatgctggagagcatgatcaagaagccccgccccactcgggctgaaggcagtgatgtggccaatgcagtcctggatggagccgactgcatcatgctgtctggagaaacagccaaaggggactatcctctggaggctgtgcgcatgcagcacctgatagctcgtgaggctgaggcagccatgttccaccgcaagctgtttgaagaacttgtgcgagcctcaagtcactccacagacctcatggaagccatggccatgggcagcgtggaggcttcttataagtgtttagcagcagctttgatagttctgacggagtctggcaggtctgctcaccaggtggccagataccgcccacgtgcccccatcattgctgtgacccggaatccccagacagctcgtcaggcccacctgtaccgtggcatcttccctgtgctgtgcaaggacccagtccaggaggcctgggctgaggacgtggacctccgggtgaactttgccatgaatgttggcaaggcccgaggcttcttcaagaagggagatgtggtcattgtgctgaccggatggcgccctggctccggcttcaccaacaccatgcgtgttgttcctgtgccgtgatggaccccagagcccctcctccagcccctgtcccacccccttcccccagcccatccattaggccagcaacgcttgtagaactcactctgggctgtaacgtggcactggtaggttgggacaccagggaagaagatcaacgcctcactgaaacatggctgtgtttgcagcctgctctagtgggacagcccagagcctggctgcccatcatgtggccccacccaatcaagggaagaaggaggaatgctggactggaggcccctggagccagatggcaagagggtgacagcttcctttcctgtgtgtactctgtccagttcctttagaaaaaatggatgcccagaggactcccaaccctggcttggggtcaagaaacagccagcaagagttaggggccttagggcactgggctgttgttccattgaagccgactctggccctggcccttacttgcttctctagctctctaggcctctccagtttgcacctgtccccaccctccactcagctgtcctgcagcaaacactccaccctccaccttccattttcccccactactgcagcacctccaggcctgttgctatagagcctacctgtatgtcaataaacaacagctgaagcacccgccgcgcttcctcctgaaggtgactgcgcccgcggggacgcagggggcggggcccgggtcgcccggagccgggattgggcagagggcggggcggcggagggattgcggcggcccgcagcgggataaccttgaggctgaggcagtggctccttgcacagcagctgcacgcgccgtggctccggatctcttcgtctttgcagcgtagcccgagtcggtcagcgccggaggacctcagcagccatgtcgaagccccatagtgaagccgggactgccttcattcagacccagcagctgcacgcagccatggctgacacattcctggagcacatgtgccgcctggacattgattcaccacccatcacagcccggaacactggcatcatctgtaccattggcccagcttcccgatcagtggagacgttgaaggagatgattaagtctggaatgaatgtggctcgtctgaacttctctcatggaactcatgagtaccatgcggagaccatcaagaatgtgcgcacagccacggaaagctttgcttctgaccccatcctctaccggcccgttgctgtggctctagacactaaaggacctgagatccgaactgggctcatcaagggcagcggcactgcagaggtggagctgaagaagggagccactctcaaaatcacgctggataacgcctacatggaaaagtgtgacgagaacatcctgtggctggactacaagaacatctgcaaggtggtggaagtgggcagcaagatctacgtggatgatgggcttatttctctccaggtgaagcagaaaggtgccgacttcctggtgacggaggtggaaaatggtggctccttgggcagcaagaagggtgtgaaccttcctggggctgctgtggacttgcctgctgtgtcggagaaggacatccaggatctgaagtttggggtcgagcaggatgttgatatggtgtttgcgtcattcatccgcaaggcatctgatgtccatgaagttaggaaggtcctgggagagaagggaaagaacatcaagattatcagcaaaatcgagaatcatgagggggttcggaggtttgatgaaatcctggaggccagtgatgggatcatggtggctcgtggtgatctaggcattgagattcctgcagagaaggtcttccttgctcagaagatgatgattggacggtgcaaccgagctgggaagcctgtcatctgtgctactcagatgctggagagcatgatcaagaagccccgccccactcgggctgaaggcagtgatgtggccaatgcagtcctggatggagccgactgcatcatgctgtctggagaaacagccaaaggggactatcctctggaggctgtgcgcatgcagcacctgatagctcgtgaggctgaggcagccatgttccaccgcaagctgtttgaagaacttgtgcgagcctcaagtcactccacagacctcatggaagccatggccatgggcagcgtggaggcttcttataagtgtttagcagcagctttgatagttctgacggagtctggcaggtctgctcaccaggtggccagataccgcccacgtgcccccatcattgctgtgacccggaatccccagacagctcgtcaggcccacctgtaccgtggcatcttccctgtgctgtgcaaggacccagtccaggaggcctgggctgaggacgtggacctccgggtgaactttgccatgaatgttggcaaggcccgaggcttcttcaagaagggagatgtggtcattgtgctgaccggatggcgccctggctccggcttcaccaacaccatgcgtgttgttcctgtgccgtgatggaccccagagcccctcctccagcccctgtcccacccccttcccccagcccatccattaggccagcaacgcttgtagaactcactctgggctgtaacgtggcactggtaggttgggacaccagggaagaagatcaacgcctcactgaaacatggctgtgtttgcagcctgctctagtgggacagcccagagcctggctgcccatcatgtggccccacccaatcaagggaagaaggaggaatgctggactggaggcccctggagccagatggcaagagggtgacagcttcctttcctgtgtgtactctgtccagttcctttagaaaaaatggatgcccagaggactcccaaccctggcttggggtcaagaaacagccagcaagagttaggggccttagggcactgggctgttgttccattgaagccgactctggccctggcccttacttgcttctctagctctctaggcctctccagtttgcacctgtccccaccctccactcagctgtcctgcagcaaacactccaccctccaccttccattttcccccactactgcagcacctccaggcctgttgctatagagcctacctgtatgtcaataaacaacagctgaagcacc

SEQ ID NO: 1052 - DNA, 11769 bp, Homo sapiens
  misc_feature (131)..(131): second gene starts at position 131
atggccccacactgggctgtctggctgctggcagcaaggctgtggggcctgggcattggggctgaggtgtggtggaaccttgtgccgcgtaagacagtgtcttctggggagctggccacggtagtacggcggttctcccagaccggcatccaggacttcctgacactgacgctgacggagcccactgggcttctgtacgtgggcgcccgagaggccctgtttgccttcagcatggaggccctggagctgcaaggagcgatctcctgggaggcccccgtggagaagaagactgagtgtatccagaaagggaagaacaaccagaccgagtgcttcaacttcatccgcttcctgcagccctacaatgcctcccacctgtacgtctgtggcacctacgccttccagcccaagtgcacctacgtcaacatgctcaccttcactttggagcatggagagtttgaagatgggaagggcaagtgtccctatgacccagctaagggccatgctggccttcttgtggatggtgagctgtactcggccacactcaacaacttcctgggcacggaacccattatcctgcgtaacatggggccccaccactccatgaagacagagtacctggccttttggctcaacgaacctcactttgtaggctctgcctatgtacctgagagtgtgggcagcttcacgggggacgacgacaaggtctacttcttcttcagggagcgggcagtggagtccgactgctatgccgagcaggtggtggctcgtgtggcccgtgtctgcaagggcgatatggggggcgcacggaccctgcagaggaagtggaccacgttcctgaaggcgcggctggcatgctctgccccgaactggcagctctacttcaaccagctgcaggcgatgcacaccctgcaggacacctcctggcacaacaccaccttctttggggtttttcaagcacagtggggtgacatgtacctgtcggccatctgtgagtaccagttggaagagatccagcgggtgtttgagggcccctataaggagtaccatgaggaagcccagaagtgggaccgctacactgaccctgtacccagccctcggcctggctcgtgcattaacaactggcatcggcgccacggctacaccagctccctggagctacccgacaacatcctcaacttcgtcaagaagcacccgctgatggaggagcaggtggggcctcggtggagccgccccctgctcgtgaagaagggcaccaacttcacccacctggtggccgaccgggttacaggacttgatggagccacctatacagtgctgttcattggcacaggagacggctggctgctcaaggctgtgagcctggggccctgggttcacctgattgaggagctgcagctgtttgaccaggagcccatgagaagcctggtgctatctcagagcaagaagctgctctttgccggctcccgctctcagctggtgcagctgcccgtggccgactgcatgaagtatcgctcctgtgcagactgtgtcctcgcccgggacccctattgcgcctggagcgtcaacaccagccgctgtgtggccgtgggtggccactctggatctctactgatccagcatgtgatgacctcggacacttcaggcatctgcaacctccgtggcagtaagaaagtcaggcccactcccaaaaacatcacggtggtggcgggcacagacctggtgctgccctgccacctctcctccaacttggcccatgcccgctggacctttgggggccgggacctgcctgcggaacagcccgggtccttcctctacgatgcccggctccaggccctggttgtgatggctgcccagccccgccatgccggggcctaccactgcttttcagaggagcagggggcgcggctggctgctgaaggctaccttgtggctgtcgtggcaggcccgtcggtgaccttggaggcccgggcccccctggaaaacctggggctggtgtggctggcggtggtggccctgggggctgtgtgcctggtgctgctgctgctggtgctgtcattgcgccggcggctgcgggaagagctggagaaaggggccaaggctactgagaggaccttggtgtaccccctggagggctccttgggcagcaagaagggtgtgaaccttcctggggctgctgtggacttgcctgctgtgtcggagaaggacatccaggatctgaagtttggggtcgagcaggatgttgatatggtgtttgcgtcattcatccgcaaggcatctgatgtccatgaagttaggaaggtcctgggagagaagggaaagaacatcaagattatcagcaaaatcgagaatcatgagggggttcggaggtttgatgaaatcctggaggccagtgatgggatcatggtggctcgtggtgatctaggcattgagattcctgcagagaaggtcttccttgctcagaagatgatgattggacggtgcaaccgagctgggaagcctgtcatctgtgctactcagatgctggagagcatgatcaagaagccccgccccactcgggctgaaggcagtgatgtggccaatgcagtcctggatggagccgactgcatcatgctgtctggagaaacagccaaaggggactatcctctggaggctgtgcgcatgcagcacctgatagctcgtgaggctgaggcagccatgttccaccgcaagctgtttgaagaacttgtgcgagcctcaagtcactccacagacctcatggaagccatggccatgggcagcgtggaggcttcttataagtgtttagcagcagctttgatagttctgacggagtctggcaggtctgctcaccaggtggccagataccgcccacgtgcccccatcattgctgtgacccggaatccccagacagctcgtcaggcccacctgtaccgtggcatcttccctgtgctgtgcaaggacccagtccaggaggcctgggctgaggacgtggacctccgggtgaactttgccatgaatgttggcaaggcccgaggcttcttcaagaagggagatgtggtcattgtgctgaccggatggcgccctggctccggcttcaccaacaccatgcgtgttgttcctgtgccgtgatggaccccagagcccctcctccagcccctgtcccacccccttcccccagcccatccattaggccagcaacgcttgtagaactcactctgggctgtaacgtggcactggtaggttgggacaccagggaagaagatcaacgcctcactgaaacatggctgtgtttgcagcctgctctagtgggacagcccagagcctggctgcccatcatgtggccccacccaatcaagggaagaaggaggaatgctggactggaggcccctggagccagatggcaagagggtgacagcttcctttcctgtgtgtactctgtccagttcctttagaaaaaatggatgcccagaggactcccaaccctggcttggggtcaagaaacagccagcaagagttaggggccttagggcactgggctgttgttccattgaagccgactctggccctggcccttacttgcttctctagctctctaggcctctccagtttgcacctgtccccaccctccactcagctgtcctgcagcaaacactccaccctccaccttccattttcccccactactgcagcacctccaggcctgttgctatagagcctacctgtatgtcaataaacaacagctgaagcacccgccgcgcttcctcctgaaggtgactgcgcccgcggggacgcagggggcggggcccgggtcgcccggagccgggattgggcagagggcggggcggcggagggattgcggcggcccgcagcgggataaccttgaggctgaggcagtggctccttgcacagcagctgcacgcgccgtggctccggatctcttcgtctttgcagcgtagcccgagtcggtcagcgccggaggtgagcggtgcaggaggctacgccatcagtccccaccaagggccagtcgcccggctagtgcggaatcccggcgcgccggccggccccgggcacgcaggcagggcggcgcaggatccagggcgtctgggatgcagtggagctcagagagaggagaacggctcctcacgcctggggcctgctcttcagaagtccccagcgccgttccttccagatcaggacctcagcagccatgtcgaagccccatagtgaagccgggactgccttcattcagacccagcagctgcacgcagccatggctgacacattcctggagcacatgtgccgcctggacattgattcaccacccatcacagcccggaacactggcatcatctgtaccattggcccagcttcccgatcagtggagacgttgaaggagatgattaagtctggaatgaatgtggctcgtctgaacttctctcatggaactcatgagtaccatgcggagaccatcaagaatgtgcgcacagccacggaaagctttgcttctgaccccatcctctaccggcccgttgctgtggctctagacactaaaggacctgagatccgaactgggctcatcaagggcagcggcactgcagaggtggagctgaagaagggagccactctcaaaatcacgctggataacgcctacatggaaaagtgtgacgagaacatcctgtggctggactacaagaacatctgcaaggtggtggaagtgggcagcaagatctacgtggatgatgggcttatttctctccaggtgaagcagaaaggtgccgacttcctggtgacggaggtggaaaatggtggctccttgggcagcaagaagggtgtgaaccttcctggggctgctgtggacttgcctgctgtgtcggagaaggacatccaggatctgaagtttggggtcgagcaggatgttgatatggtgtttgcgtcattcatccgcaaggcatctgatgtccatgaagttaggaaggtcctgggagagaagggaaagaacatcaagattatcagcaaaatcgagaatcatgagggggttcggaggtttgatgaaatcctggaggccagtgatgggatcatggtggctcgtggtgatctaggcattgagattcctgcagagaaggtcttccttgctcagaagatgatgattggacggtgcaaccgagctgggaagcctgtcatctgtgctactcagatgctggagagcatgatcaagaagccccgccccactcgggctgaaggcagtgatgtggccaatgcagtcctggatggagccgactgcatcatgctgtctggagaaacagccaaaggggactatcctctggaggctgtgcgcatgcagcacctgatagctcgtgaggctgaggcagccatgttccaccgcaagctgtttgaagaacttgtgcgagcctcaagtcactccacagacctcatggaagccatggccatgggcagcgtggaggcttcttataagtgtttagcagcagctttgatagttctgacggagtctggcaggtctgctcaccaggtggccagataccgcccacgtgcccccatcattgctgtgacccggaatccccagacagctcgtcaggcccacctgtaccgtggcatcttccctgtgctgtgcaaggacccagtccaggaggcctgggctgaggacgtggacctccgggtgaactttgccatgaatgttggcaaggcccgaggcttcttcaagaagggagatgtggtcattgtgctgaccggatggcgccctggctccggcttcaccaacaccatgcgtgttgttcctgtgccgtgatggaccccagagcccctcctccagcccctgtcccacccccttcccccagcccatccattaggccagcaacgcttgtagaactcactctgggctgtaacgtggcactggtaggttgggacaccagggaagaagatcaacgcctcactgaaacatggctgtgtttgcagcctgctctagtgggacagcccagagcctggctgcccatcatgtggccccacccaatcaagggaagaaggaggaatgctggactggaggcccctggagccagatggcaagagggtgacagcttcctttcctgtgtgtactctgtccagttcctttagaaaaaatggatgcccagaggactcccaaccctggcttggggtcaagaaacagccagcaagagttaggggccttagggcactgggctgttgttccattgaagccgactctggccctggcccttacttgcttctctagctctctaggcctctccagtttgcacctgtccccaccctccactcagctgtcctgcagcaaacactccaccctccaccttccattttcccccactactgcagcacctccaggcctgttgctatagagcctacctgtatgtcaataaacaacagctgaagcacccgccgcgcttcctcctgaaggtgactgcgcccgcggggacgcagggggcggggcccgggtcgcccggagccgggattgggcagagggcggggcggcggagggattgcggcggcccgcagcgggataaccttgaggctgaggcagtggctccttgcacagcagctgcacgcgccgtggctccggatctcttcgtctttgcagcgtagcccgagtcggtcagcgccggaggtgagcggtgcaggaggctacgccatcagtccccaccaagggccagtcgcccggctagtgcggaatcccggcgcgccggccggccccgggcacgcaggcagggcggcgcaggatccagggcgtctgggatgcagtggagctcagagagaggagaacggctcctcacgcctggggcctgctcttcagaagtccccagcgccgttccttccagatcaggacctcagcagccatgtcgaagccccatagtgaagccgggactgccttcattcagacccagcagctgcacgcagccatggctgacacattcctggagcacatgtgccgcctggacattgattcaccacccatcacagcccggaacactggcatcatctgtaccattggcccagcttcccgatcagtggagacgttgaaggagatgattaagtctggaatgaatgtggctcgtctgaacttctctcatggaactcatgagtaccatgcggagaccatcaagaatgtgcgcacagccacggaaagctttgcttctgaccccatcctctaccggcccgttgctgtggctctagacactaaaggacctgagatccgaactgggctcatcaagggcagcggcactgcagaggtggagctgaagaagggagccactctcaaaatcacgctggataacgcctacatggaaaagtgtgacgagaacatcctgtggctggactacaagaacatctgcaaggtggtggaagtgggcagcaagatctacgtggatgatgggcttatttctctccaggtgaagcagaaaggtgccgacttcctggtgacggaggtggaaaatggtggctccttgggcagcaagaagggtgtgaaccttcctggggctgctgtggacttgcctgctgtgtcggagaaggacatccaggatctgaagtttggggtcgagcaggatgttgatatggtgtttgcgtcattcatccgcaaggcatctgatgtccatgaagttaggaaggtcctgggagagaagggaaagaacatcaagattatcagcaaaatcgagaatcatgagggggttcggaggtttgatgaaatcctggaggccagtgatgggatcatggtggctcgtggtgatctaggcattgagattcctgcagagaaggtcttccttgctcagaagatgatgattggacggtgcaaccgagctgggaagcctgtcatctgtgctactcagatgctggagagcatgatcaagaagccccgccccactcgggctgaaggcagtgatgtggccaatgcagtcctggatggagccgactgcatcatgctgtctggagaaacagccaaaggggactatcctctggaggctgtgcgcatgcagcacctgatagctcgtgaggctgaggcagccatgttccaccgcaagctgtttgaagaacttgtgcgagcctcaagtcactccacagacctcatggaagccatggccatgggcagcgtggaggcttcttataagtgtttagcagcagctttgatagttctgacggagtctggcaggtctgctcaccaggtggccagataccgcccacgtgcccccatcattgctgtgacccggaatccccagacagctcgtcaggcccacctgtaccgtggcatcttccctgtgctgtgcaaggacccagtccaggaggcctgggctgaggacgtggacctccgggtgaactttgccatgaatgttggcaaggcccgaggcttcttcaagaagggagatgtggtcattgtgctgaccggatggcgccctggctccggcttcaccaacaccatgcgtgttgttcctgtgccgtgatggaccccagagcccctcctccagcccctgtcccacccccttcccccagcccatccattaggccagcaacgcttgtagaactcactctgggctgtaacgtggcactggtaggttgggacaccagggaagaagatcaacgcctcactgaaacatggctgtgtttgcagcctgctctagtgggacagcccagagcctggctgcccatcatgtggccccacccaatcaagggaagaaggaggaatgctggactggaggcccctggagccagatggcaagagggtgacagcttcctttcctgtgtgtactctgtccagttcctttagaaaaaatggatgcccagaggactcccaaccctggcttggggtcaagaaacagccagcaagagttaggggccttagggcactgggctgttgttccattgaagccgactctggccctggcccttacttgcttctctagctctctaggcctctccagtttgcacctgtccccaccctccactcagctgtcctgcagcaaacactccaccctccaccttccattttcccccactactgcagcacctccaggcctgttgctatagagcctacctgtatgtcaataaacaacagctgaagcacccgccgcgcttcctcctgaaggtgactgcgcccgcggggacgcagggggcggggcccgggtcgcccggagccgggattgggcagagggcggggcggcggagggattgcggcggcccgcagcgggataaccttgaggctgaggcagtggctccttgcacagcagctgcacgcgccgtggctccggatctcttcgtctttgcagcgtagcccgagtcggtcagcgccggaggtgagcggtgcaggaggctacgccatcagtccccaccaagggccagtcgcccggctagtgcggaatcccggcgcgccggccggccccgggcacgcaggcagggcggcgcaggatccagggcgtctgggatgcagtggagctcagagagaggagaacggctcctcacgcctggggcctgctcttcagaagtccccagcgccgttccttccagatcaggacctcagcagccatgtcgaagccccatagtgaagccgggactgccttcattcagacccagcagctgcacgcagccatggctgacacattcctggagcacatgtgccgcctggacattgattcaccacccatcacagcccggaacactggcatcatctgtaccattggcccagcttcccgatcagtggagacgttgaaggagatgattaagtctggaatgaatgtggctcgtctgaacttctctcatggaactcatgagtaccatgcggagaccatcaagaatgtgcgcacagccacggaaagctttgcttctgaccccatcctctaccggcccgttgctgtggctctagacactaaaggacctgagatccgaactgggctcatcaagggcagcggcactgcagaggtggagctgaagaagggagccactctcaaaatcacgctggataacgcctacatggaaaagtgtgacgagaacatcctgtggctggactacaagaacatctgcaaggtggtggaagtgggcagcaagatctacgtggatgatgggcttatttctctccaggtgaagcagaaaggtgccgacttcctggtgacggaggtggaaaatggtggctccttgggcagcaagaagggtgtgaaccttcctggggctgctgtggacttgcctgctgtgtcggagaaggacatccaggatctgaagtttggggtcgagcaggatgttgatatggtgtttgcgtcattcatccgcaaggcatctgatgtccatgaagttaggaaggtcctgggagagaagggaaagaacatcaagattatcagcaaaatcgagaatcatgagggggttcggaggtttgatgaaatcctggaggccagtgatgggatcatggtggctcgtggtgatctaggcattgagattcctgcagagaaggtcttccttgctcagaagatgatgattggacggtgcaaccgagctgggaagcctgtcatctgtgctactcagatgctggagagcatgatcaagaagccccgccccactcgggctgaaggcagtgatgtggccaatgcagtcctggatggagccgactgcatcatgctgtctggagaaacagccaaaggggactatcctctggaggctgtgcgcatgcagcacctgatagctcgtgaggctgaggcagccatgttccaccgcaagctgtttgaagaacttgtgcgagcctcaagtcactccacagacctcatggaagccatggccatgggcagcgtggaggcttcttataagtgtttagcagcagctttgatagttctgacggagtctggcaggtctgctcaccaggtggccagataccgcccacgtgcccccatcattgctgtgacccggaatccccagacagctcgtcaggcccacctgtaccgtggcatcttccctgtgctgtgcaaggacccagtccaggaggcctgggctgaggacgtggacctccgggtgaactttgccatgaatgttggcaaggcccgaggcttcttcaagaagggagatgtggtcattgtgctgaccggatggcgccctggctccggcttcaccaacaccatgcgtgttgttcctgtgccgtgatggaccccagagcccctcctccagcccctgtcccacccccttcccccagcccatccattaggccagcaacgcttgtagaactcactctgggctgtaacgtggcactggtaggttgggacaccagggaagaagatcaacgcctcactgaaacatggctgtgtttgcagcctgctctagtgggacagcccagagcctggctgcccatcatgtggccccacccaatcaagggaagaaggaggaatgctggactggaggcccctggagccagatggcaagagggtgacagcttcctttcctgtgtgtactctgtccagttcctttagaaaaaatggatgcccagaggactcccaaccctggcttggggtcaagaaacagccagcaagagttaggggccttagggcactgggctgttgttccattgaagccgactctggccctggcccttacttgcttctctagctctctaggcctctccagtttgcacctgtccccaccctccactcagctgtcctgcagcaaacactccaccctccaccttccattttcccccactactgcagcacctccaggcctgttgctatagagcctacctgtatgtcaataaacaacagctgaagcacc

SEQ ID NO: 1053 - DNA, 1601 bp, Homo sapiens
  misc_feature (935)..(935): second gene starts at position 935
atgccctaccaatatccagcactgaccccggagcagaagaaggagctgtctgacatcgctcaccgcatcgtggcacctggcaagggcatcctggctgcagatgagtccactgggagcattgccaagcggctgcagtccattggcaccgagaacaccgaggagaaccggcgcttctaccgccagctgctgctgacagctgacgaccgcgtgaacccctgcattgggggtgtcatcctcttccatgagacactctaccagaaggcggatgatgggcgtcccttcccccaagttatcaaatccaagggcggtgttgtgggcatcaaggtagacaagggcgtggtccccctggcagggacaaatggcgagactaccacccaagggttggatgggctgtctgagcgctgtgcccagtacaagaaggacggagctgacttcgccaagtggcgttgtgtgctgaagattggggaacacaccccctcagccctcgccatcatggaaaatgccaatgttctggcccgttatgccagtatctgccagcagaatggcattgtgcccatcgtggagcctgagatcctccctgatggggaccatgacttgaagcgctgccagtatgtgaccgagaaggtgctggctgctgtctacaaggctctgagtgaccaccacatctacctggaaggcaccttgctgaagcccaacatggtcaccccaggccatgcttgcactcagaagttttctcatgaggagattgccatggcgaccgtcacagcgctgcgccgcacagtgccccccgctgtcactgggatcaccttcctgtctggaggccagagtgaggaggaggcgtccatcaacctcaatgccattaacaagtgccccctgctgaagccctgggccctgaccttctcctacggccgagccctgcaggcctctgccctgacaaaaatgacaaattctttatttaaatcaacaaactcatcttcctcaagccccagaccatggtaggcagccctccctctccatcccctcaccccaccccttagccacagtgaagggaatggaaaatgagaagccacgagggcccctgccagggaaggctgccccagatgtgtggtgagcacagtcagtgcagctgtggctggggcagcagctgccacaggctcctccctataaattaagttcctgcagccacagctgtgggagaagcatacttgtagaagcaaggccagtccagcatcagaaggcagaggcagcatcagtgactcccagccatggaatgaacggaggacacagagctcagagacagaacaggccagggggaagaaggagagacagaataggccagggcatggcggtgagggactgaggcccctaaattttggtcccaggggaaaggaagaggccagttggtccagttttgatggctatggggaagggaatgtattagtaagcatgggggagaggatgccagcaggcacctcagaggtgacaggacaggctgaaccccccaccctgacagaaaggagcttgagagctctggggctctctgggaatgtcactgctaaaatatatatctacatatatattaaccattcgtgggagggcag

SEQ ID NO: 1054 - DNA, 1601 bp, Homo sapiens; identical to SEQ ID NO: 1053
  misc_feature (935)..(935): second gene starts at position 935

SEQ ID NO: 1055 - DNA, 1601 bp, Homo sapiens; identical to SEQ ID NO: 1053
  misc_feature (935)..(935): second gene starts at position 935

SEQ ID NO: 1056 - DNA, 1601 bp, Homo sapiens; identical to SEQ ID NO: 1053
  misc_feature (935)..(935): second gene starts at position 935

SEQ ID NO: 1057 - DNA, 6956 bp, Homo sapiens
  misc_feature (503)..(503): second gene starts at position 503
atgtcgggatccacacagcctgtggcacagacgtggagggccactgagccccgctacccgccccacagcctttcctacccagtgcagatcgcccggacgcacacggacgtcgggctcctggagtaccagcaccactcccgcgactatgcctcccacctgtcgcccggctccatcatccagccccagcggcggaggccctccctgctgtctgagttccagcccgggaatgaacggtcccaggagctccacctgcggccagagtcccactcatacctgcccgagctggggaagtcagagatggagttcattgaaagcaagcgccctcggctagagctgctgcctgaccccctgctgcgaccgtcacccctgctggccacgggccagcctgcgggatctgaagacctcaccaaggaccgtagcctgacgggcaagctggaaccggtgtctccccccagccccccgcacactgaccctgagctggagctggtgccgccacggctgtccaaggaggagctgatccagaacatggaccgcgtggaccgagagatcaccatggtagagcagcagatctctaagctgaagaagaagcagcaacagctggaggaggaggctgccaagccgcccgagcctgagaagcccgtgtcaccgccgcccatcgagtcgaagcaccgcagcctggtgcagatcatctacgacgagaaccggaagaaggctgaagctgcacatcggattctggaaggcctggggccccaggtggagctgccgctgtacaaccagccctccgacacccggcagtatcatgagaacatcaaaataaaccaggcgatgcggaagaagctaatcttgtacttcaagaggaggaatcacgctcggaaacaatgggagcagaagttctgccagcgctatgaccagctcatggaggcctgggagaagaaggtggagcgcatcgagaacaacccccggcggcgggccaaggagagcaaggtgcgcgagtactacgagaagcagttccctgagatccgcaagcagcgcgagctgcaggagcgcatgcagagcagggtgggccagcggggcagtgggctgtccatgtcggccgcccgcagcgagcacgaggtgtcagagatcatcgatggcctctcagagcaggagaacctggagaagcagatgcgccagctggccgtgatcccgcccatgctgtacgacgctgaccagcagcgcatcaagttcatcaacatgaacgggcttatggccgaccccatgaaggtgtacaaagaccgccaggtcatgaacatgtggagtgagcaggagaaggagaccttccgggagaagttcatgcagcatcccaagaactttggcctgatcgcatcattcctggagaggaagacagtggctgagtgcgtcctctattactacctgactaagaagaatgagaactataagagcctggtgagacggagctatcggcgccgcggcaagagccagcagcagcaacaacagcagcagcagcagcagcagcagcagcagcagcagcccatgccccgcagcagccaggaggagaaagatgagaaggagaaggaaaaggaggcggagaaggaggaggagaagccggaggtggagaacgacaaggaagacctcctcaaggagaagacagacgacacctcaggggaggacaacgacgagaaggaggctgtggcctccaaaggccgcaaaactgccaacagccagggaagacgcaaaggccgcatcacccgctcaatggctaatgaggccaacagcgaggaggccatcaccccccagcagagcgccgagctggcctccatggagctgaatgagagttctcgctggacagaagaagaaatggaaacagccaagaaaggtctcctggaacacggccgcaactggtcggccatcgcccggatggtgggctccaagactgtgtcgcagtgtaagaacttctacttcaactacaagaagaggcagaacctcgatgagatcttgcagcagcacaagctgaagatggagaaggagaggaacgcgcggaggaagaagaagaaagcgccggcggcggccagcgaggaggctgcattcccgcccgtggtggaggatgaggagatggaggcgtcgggcgtgagcggaaatgaggaggagatggtggaggaggctgaagccactgtcaacaacagctcagacaccgagagcatcccctctcctcacactgaggccgccaaggacacagggcagaatgggcccaagcccccagccaccctgggcgccgacgggccacccccagggccacccaccccaccaccggaggacatcccggcccccactgagcccaccccggcctctgaagccaccggagcccctacgcccccaccagcacccccatcgccctctgcacctcctcctgtggtccccaaggaggagaaggaggaggagaccgcagcagcgcccccagtggaggagggggaggagcagaagccccccgcggctgaggagctggcagtggacacagggaaggccgaggagcccgtcaagagcgagtgcacggaggaagccgaggaggggccggccaagggcaaggacgcggaggccgctgaggccacggccgagggggcgctcaaggcagagaagaaggagggcgggagcggcagggccaccacagccaagagctcgggcgccccccaggacagcgactccagtgctacctgcagtgcagacgaggtggatgaggccgagggcggcgacaagaaccggctgctgtccccaaggcccagcctcctcaccccgactggcgacccccgggccaatgcctcaccccagaagccactggacctgaagcagctgaagcagcgagcggctgccatcccccccatccaggtcaccaaagtccatgagcccccccgggaggacgcagctcccaccaagccagctcccccagccccaccgccaccgcaaaacctgcagccggagagcgacgcccctcagcagcctggcagcagcccccggggcaagagcaggagcccggcaccccccgccgacaaggaggcagagaagcctgtgttcttcccagccttcgcagccgaggcccagaagctgcctggggaccccccttgctggacttccggcctgcccttccccgtgcccccccgtgaggtgatcaaggcctccccgcatgccccggacccctcagccttctcctacgctccacctggtcacccactgcccctgggcctccatgacactgcccggcccgtcctgccgcgcccacccaccatctccaacccgcctcccctcatctcctctgccaagcaccccagcgtcctcgagaggcaaataggtgccatctcccaaggaatgtcggtccagctccacgtcccgtactcagagcatgccaaggccccggtgggccctgtcaccatggggctgcccctgcccatggaccccaaaaagctggcacccttcagcggagtgaagcaggagcagctgtccccacggggccaggctgggccaccggagagcctgggggtgcccacagcccaggaggcgtccgtgctgagagggacagctctgggctcagttccgggcggaagcatcaccaaaggcattcccagcacacgggtgccctcggacagcgccatcacataccgcggctccatcacccacggcacgccagctgacgtcctgtacaagggcaccatcaccaggatcatcggcgaggacagcccgagtcgcttggaccgcggccgggaggacagcctgcccaagggccacgtcatctacgaaggcaagaagggccacgtcttgtcctatgagggtggcatgtctgtgacccagtgctccaaggaggacggcagaagcagctcaggacccccccatgagacggccgcccccaagcgcacctatgacatgatggagggccgcgtgggcagagccatctcctcagccagcatcgaaggtctcatgggccgtgccatcccgccggagcgacacagcccccaccacctcaaagagcagcaccacatccgcgggtccatcacacaagggatccctcggtcctacgtggaggcacaggaggactacctgcgtcgggaggccaagctcctaaagcgggagggcacgcctccgcccccaccgccctcacgggacctgaccgaggcctacaagacgcaggccctgggccccctgaagctgaagccggcccatgagggcctggtggccacggtgaaggaggcgggccgctccatccatgagatcccgcgcgaggagctgcggcacacgcccgagctgcccctggccccgcggccgctcaaggagggctccatcacgcagggcaccccgctcaagtacgacaccggcgcgtccaccactggctccaaaaagcacgacgtacgctccctcatcggcagccccggccggacgttcccacccgtgcacccgctggatgtgatggccgacgcccgggcactggaacgtgcctgctacgaggagagcctgaagagccggccagggaccgccagcagctcggggggctccattgcgcgcggcgccccggtcattgtgcctgagctgggtaagccgcggcagagccccctgacctatgaggaccacggggcaccctttgccggccacctcccacgaggttcgcccgtgaccacgcgggagcccacgccgcgcctgcaggagggcagcctttcgtccagcaaggcatcccaggaccgaaagctgacgtcgacgcctcgtgagatcgccaagtccccgcacagcaccgtgcccgagcaccacccacaccccatctcgccctatgagcacctgcttcggggcgtgagtggcgtggacctgtatcgcagccacatccccctggccttcgaccccacctccataccccgcggcatccctctggacgcagccgctgcctactacctgccccgacacctggcccccaaccccacctacccgcacctgtacccaccctacctcatccgcggctaccccgacacggcggcgctggagaaccggcagaccatcatcaatgactacatcacctcgcagcagatgcaccacaacgcggccaccgccatggcccagcgagctgatatgctgaggggcctctcgccccgcgagtcctcgctggcactcaactacgctgcgggtccccgaggcatcatcgacctgtcccaagtgccacacctgcctgtgctcgtgcccccgacaccaggcaccccagccaccgccatggaccgccttgcctacctccccaccgcgccccagcccttcagcagccgccacagcagctccccactctccccaggaggtccaacacacttgacaaaaccaaccaccacgtcctcgtccgagcgggagcgagaccgggatcgagagcgggaccgggatcgggagcgggaaaagtccatcctcacgtccaccacgacggtggagcacgcacccatctggagacctggtacagagcagagcagcggcagcagcggcgggggtgggggcccgccgctgccgcagccaaagctgctgccaaagccgcccagtttggcctagtgggagccgctgggctcggaggactcggagtcggagggcttggagttccaggtgttgggggccttggaggtatacctccagctgcagccgctaaagcagctaaatacggagtggcagcaagacctggcttcggattgtctcccattttcccaggtggggcctgcctggggaaagcttgtggccggaagagaaaatgagcttcctaggacccctgactcacgacctcatcaacgttggtgctactgcttggtggagaatgtaaaccctttgtaaccccatcccatgcccctccgactccccaccccaggagggaacgggcaggccgggcggccttgcagatccacagggcaaggaaacaagaggggagcggccaagtgccccgaccaggaggccccctacttcagaggcaagggccatgtggtcctggccccccaccccatcccttcccacctaggagctccccctccacacagcctccatctccaggggaacttggtgctacacgctggtgctcttatcttcctggggggagggaggagggaagggtggcccctcggggaaccccctacctggggctcctctaaagatggtgcagacacttcctgggcagtcccagctccccctgcccaccaggacccaccgttggctgccatccagttggtacccaagcacctgaagcctcaaagctggattcgctctagcatccctcctctcctgggtccacttggccgtctcctccccaccgatcgctgttccccacatctggggcgcttttgggttggaaaaccaccccacactgggaatagccaccttgcccttgtagaatccatccgcccatccgtccattcatccatcggtccgtccatccatgtccccagttgaccgcccggcaccactagctggctgggtgcacccaccatcaacctggttgacctgtcatggccgcctgtgccctgcctccacccccatcctacactcccccagggcgtgcggggctgtgcagactggggtgccaggcatctcctccccacccggggtgtccccacatgcagtactgtataccccccatccctccctcggtccactgaacttcagagcagttcccattcctgccccgcccatctttttgtgtctcgctgtgatagatcaataaatattttattttttgtcctggatatttggggattatttttgattgttgatattctcttttggttttattgttgtggttcattgaaaaaaaaagataatttttttttctgatccggggagctgtatccccagtagaaaaaacattttaatcactctaatataactctggatgaaacacacctttttttttaataagaaaagagaattaactgcttcagaaatgactaataaatgaaaaacctttaaaggaa

SEQ ID NO: 1058 - DNA, 6956 bp, Homo sapiens; identical to SEQ ID NO: 1057
  misc_feature (503)..(503): second gene starts at position 503

SEQ ID NO: 1059 - DNA, 7010 bp, Homo sapiens
  misc_feature (503)..(503): second gene starts at position 503
atgtcgggatccacacagcctgtggcacagacgtggagggccactgagccccgctacccgccccacagcctttcctacccagtgcagatcgcccggacgcacacggacgtcgggctcctggagtaccagcaccactcccgcgactatgcctcccacctgtcgcccggctccatcatccagccccagcggcggaggccctccctgctgtctgagttccagcccgggaatgaacggtcccaggagctccacctgcggccagagtcccactcatacctgcccgagctggggaagtcagagatggagttcattgaaagcaagcgccctcggctagagctgctgcctgaccccctgctgcgaccgtcacccctgctggccacgggccagcctgcgggatctgaagacctcaccaaggaccgtagcctgacgggcaagctggaaccggtgtctccccccagccccccgcacactgaccctgagctggagctggtgccgccacggctgtccaaggaggagctgatccagaacatggaccgcgtggaccgagagatcaccatggtagagcagcagatctctaagctgaagaagaagcagcaacagctggaggaggaggctgccaagccgcccgagcctgagaagcccgtgtcaccgccgcccatcgagtcgaagcaccgcagcctggtgcagatcatctacgacgagaaccggaagaaggctgaagctgcacatcggattctggaaggcctggggccccaggtggagctgccgctgtacaaccagccctccgacacccggcagtatcatgagaacatcaaaataaaccaggcgatgcggaagaagctaatcttgtacttcaagaggaggaatcacgctcggaaacaatgggagcagaagttctgccagcgctatgaccagctcatggaggcctgggagaagaaggtggagcgcatcgagaacaacccccggcggcgggccaaggagagcaaggtgcgcgagtactacgagaagcagttccctgagatccgcaagcagcgcgagctgcaggagcgcatgcagagcagggtgggccagcggggcagtgggctgtccatgtcggccgcccgcagcgagcacgaggtgtcagagatcatcgatggcctctcagagcaggagaacctggagaagcagatgcgccagctggccgtgatcccgcccatgctgtacgacgctgaccagcagcgcatcaagttcatcaacatgaacgggcttatggccgaccccatgaaggtgtacaaagaccgccaggtcatgaacatgtggagtgagcaggagaaggagaccttccgggagaagttcatgcagcatcccaagaactttggcctgatcgcatcattcctggagaggaagacagtggctgagtgcgtcctctattactacctgactaagaagaatgagaactataagagcctggtgagacggagctatcggcgccgcggcaagagccagcagcagcaacaacagcagcagcagcagcagcagcagcagcagcagcagcccatgccccgcagcagccaggaggagaaagatgagaaggagaaggaaaaggaggcggagaaggaggaggagaagccggaggtggagaacgacaaggaagacctcctcaaggagaagacagacgacacctcaggggaggacaacgacgagaaggaggctgtggcctccaaaggccgcaaaactgccaacagccagggaagacgcaaaggccgcatcacccgctcaatggctaatgaggccaacagcgaggaggccatcaccccccagcagagcgccgagctggcctccatggagctgaatgagagttctcgctggacagaagaagaaatggaaacagccaagaaaggtctcctggaacacggccgcaactggtcggccatcgcccggatggtgggctccaagactgtgtcgcagtgtaagaacttctacttcaactacaagaagaggcagaacctcgatgagatcttgcagcagcacaagctgaagatggagaaggagaggaacgcgcggaggaagaagaagaaagcgccggcggcggccagcgaggaggctgcattcccgcccgtggtggaggatgaggagatggaggcgtcgggcgtgagcggaaatgaggaggagatggtggaggaggctgaagccactgtcaacaacagctcagacaccgagagcatcccctctcctcacactgaggccgccaaggacacagggcagaatgggcccaagcccccagccaccctgggcgccgacgggccacccccagggccacccaccccaccaccggaggacatcccggcccccactgagcccaccccggcctctgaagccaccggagcccctacgcccccaccagcacccccatcgccctctgcacctcctcctgtggtccccaaggaggagaaggaggaggagaccgcagcagcgcccccagtggaggagggggaggagcagaagccccccgcggctgaggagctggcagtggacacagggaaggccgaggagcccgtcaagagcgagtgcacggaggaagccgaggaggggccggccaagggcaaggacgcggaggccgctgaggccacggccgagggggcgctcaaggcagagaagaaggagggcgggagcggcagggccaccacagccaagagctcgggcgccccccaggacagcgactccagtgctacctgcagtgcagacgaggtggatgaggccgagggcggcgacaagaaccggctgctgtccccaaggcccagcctcctcaccccgactggcgacccccgggccaatgcctcaccccagaagccactggacctgaagcagctgaagcagcgagcggctgccatcccccccatccaggtcaccaaagtccatgagcccccccgggaggacgcagctcccaccaagccagctcccccagccccaccgccaccgcaaaacctgcagccggagagcgacgcccctcagcagcctggcagcagcccccggggcaagagcaggagcccggcaccccccgccgacaaggaggcagagaagcctgtgttcttcccagccttcgcagccgaggcccagaagctgcctggggaccccccttgctggacttccggcctgcccttccccgtgcccccccgtgaggtgatcaaggcctccccgcatgccccggacccctcagccttctcctacgctccacctggtcacccactgcccctgggcctccatgacactgcccggcccgtcctgccgcgcccacccaccatctccaacccgcctcccctcatctcctctgccaagcaccccagcgtcctcgagaggcaaataggtgccatctcccaaggaatgtcggtccagctccacgtcccgtactcagagcatgccaaggccccggtgggccctgtcaccatggggctgcccctgcccatggaccccaaaaagctggcacccttcagcggagtgaagcaggagcagctgtccccacggggccaggctgggccaccggagagcctgggggtgcccacagcccaggaggcgtccgtgctgagagggacagctctgggctcagttccgggcggaagcatcaccaaaggcattcccagcacacgggtgccctcggacagcgccatcacataccgcggctccatcacccacggcacgccagctgacgtcctgtacaagggcaccatcaccaggatcatcggcgaggacagcccgagtcgcttggaccgcggccgggaggacagcctgcccaagggccacgtcatctacgaaggcaagaagggccacgtcttgtcctatgagggtggcatgtctgtgacccagtgctccaaggaggacggcagaagcagctcaggacccccccatgagacggccgcccccaagcgcacctatgacatgatggagggccgcgtgggcagagccatctcctcagccagcatcgaaggtctcatgggccgtgccatcccgccggagcgacacagcccccaccacctcaaagagcagcaccacatccgcgggtccatcacacaagggatccctcggtcctacgtggaggcacaggaggactacctgcgtcgggaggccaagctcctaaagcgggagggcacgcctccgcccccaccgccctcacgggacctgaccgaggcctacaagacgcaggccctgggccccctgaagctgaagccggcccatgagggcctggtggccacggtgaaggaggcgggccgctccatccatgagatcccgcgcgaggagctgcggcacacgcccgagctgcccctggccccgcggccgctcaaggagggctccatcacgcagggcaccccgctcaagtacgacaccggcgcgtccaccactggctccaaaaagcacgacgtacgctccctcatcggcagccccggccggacgttcccacccgtgcacccgctggatgtgatggccgacgcccgggcactggaacgtgcctgctacgaggagagcctgaagagccggccagggaccgccagcagctcggggggctccattgcgcgcggcgccccggtcattgtgcctgagctgggtaagccgcggcagagccccctgacctatgaggaccacggggcaccctttgccggccacctcccacgaggttcgcccgtgaccacgcgggagcccacgccgcgcctgcaggagggcagcctttcgtccagcaaggcatcccaggaccgaaagctgacgtcgacgcctcgtgagatcgccaagtccccgcacagcaccgtgcccgagcaccacccacaccccatctcgccctatgagcacctgcttcggggcgtgagtggcgtggacctgtatcgcagccacatccccctggccttcgaccccacctccataccccgcggcatccctctggacgcagccgctgcctactacctgccccgacacctggcccccaaccccacctacccgcacctgtacccaccctacctcatccgcggctaccccgacacggcggcgctggagaaccggcagaccatcatcaatgactacatcacctcgcagcagatgcaccacaacgcggccaccgccatggcccagcgagctgatatgctgaggggcctctcgccccgcgagtcctcgctggcactcaactacgctgcgggtccccgaggcatcatcgacctgtcccaagtgccacacctgcctgtgctcgtgcccccgacaccaggcaccccagccaccgccatggaccgccttgcctacctccccaccgcgccccagcccttcagcagccgccacagcagctccccactctccccaggaggtccaacacacttgacaaaaccaaccaccacgtcctcgtccgagcgggagcgagaccgggatcgagagcgggaccgggatcgggagcgggaaaagtccatcctcacgtccaccacgacggtggagcacgcacccatctggagacctggtacagagcagagcagcggcagcagcggcgggggtgggggcccgccgctgccgcagccaaagctgctgccaaagccgcccagtttggcctagtgggagccgctgggctcggaggactcggagtcggagggcttggagttccaggtgttgggggccttggaggtatacctccagctgcagccgctaaagcagctaaatacggtgctgctggccttggaggtgtcctagggggtgccgggcagttcccacttggaggagtggcagcaagacctggcttcggattgtctcccattttcccaggtggggcctgcctggggaaagcttgtggccggaagagaaaatgagcttcctaggacccctgactcacgacctcatcaacgttggtgctactgcttggtggagaatgtaaaccctttgtaaccccatcccatgcccctccgactccccaccccaggagggaacgggcaggccgggcggccttgcagatccacagggcaaggaaacaagaggggagcggccaagtgccccgaccaggaggccccctacttcagaggcaagggccatgtggtcctggccccccaccccatcccttcccacctaggagctccccctccacacagcctccatctccaggggaacttggtgctacacgctggtgctcttatcttcctggggggagggaggagggaagggtggcccctcggggaaccccctacctggggctcctctaaagatggtgcagacacttcctgggcagtcccagctccccctgcccaccaggacccaccgttggctgccatccagttggtacccaagcacctgaagcctcaaagctggattcgctctagcatccctcctctcctgggtccacttggccgtctcctccccaccgatcgctgttccccacatctggggcgcttttgggttggaaaaccaccccacactgggaatagccaccttgcccttgtagaatccatccgcccatccgtccattcatccatcggtccgtccatccatgtccccagttgaccgcccggcaccactagctggctgggtgcacccaccatcaacctggttgacctgtcatggccgcctgtgccctgcctccacccccatcctacactcccccagggcgtgcggggctgtgcagactggggtgccaggcatctcctccccacccggggtgtccccacatgcagtactgtataccccccatccctccctcggtccactgaacttcagagcagttcccattcctgccccgcccatctttttgtgtctcgctgtgatagatcaataaatattttattttttgtcctggatatttggggattatttttgattgttgatattctcttttggttttattgttgtggttcattgaaaaaaaaagataatttttttttctgatccggggagctgtatccccagtagaaaaaacattttaatcactctaatataactctggatgaaacacacctttttttttaataagaaaagagaattaactgcttcagaaatgactaataaatgaaaaacctttaaaggaa

SEQ ID NO: 1060 - DNA, 6956 bp, Homo sapiens; identical to SEQ ID NO: 1057
  misc_feature (503)..(503): second gene starts at position 503

SEQ ID NO: 1061 - DNA, 7010 bp, Homo sapiens; identical to SEQ ID NO: 1059
  misc_feature (503)..(503): second gene starts at position 503

SEQ ID NO: 1062 - DNA, 7004 bp, Homo sapiens
  misc_feature (551)..(551): second gene starts at position 551
atgtcgggatccacacagcctgtggcacagacgtggagggccactgagccccgctacccgccccacagcctttcctacccagtgcagatcgcccggacgcacacggacgtcgggctcctggagtaccagcaccactcccgcgactatgcctcccacctgtcgcccggctccatcatccagccccagcggcggaggccctccctgctgtctgagttccagcccgggaatgaacggtcccaggagctccacctgcggccagagtcccactcatacctgcccgagctggggaagtcagagatggagttcattgaaagcaagcgccctcggctagagctgctgcctgaccccctgctgcgaccgtcacccctgctggccacgggccagcctgcgggatctgaagacctcaccaaggaccgtagcctgacgggcaagctggaaccggtgtctccccccagccccccgcacactgaccctgagctggagctggtgccgccacggctgtccaaggaggagctgatccagaacatggaccgcgtggaccgagagatcaccatggtagagcagcagatctctaagctgaagaagaagcagcaacagctggaggaggaggctgccaagccgcccgagcctgagaagcccgtgtcaccgccgcccatcgagtcgaagcaccgcagcctggtgcagatcatctacgacgagaaccggaagaaggctgaagctgcacatcggattctggaaggcctggggccccaggtggagctgccgctgtacaaccagccctccgacacccggcagtatcatgagaacatcaaaataaaccaggcgatgcggaagaagctaatcttgtacttcaagaggaggaatcacgctcggaaacaatgggagcagaagttctgccagcgctatgaccagctcatggaggcctgggagaagaaggtggagcgcatcgagaacaacccccggcggcgggccaaggagagcaaggtgcgcgagtactacgagaagcagttccctgagatccgcaagcagcgcgagctgcaggagcgcatgcagagcagggtgggccagcggggcagtgggctgtccatgtcggccgcccgcagcgagcacgaggtgtcagagatcatcgatggcctctcagagcaggagaacctggagaagcagatgcgccagctggccgtgatcccgcccatgctgtacgacgctgaccagcagcgcatcaagttcatcaacatgaacgggcttatggccgaccccatgaaggtgtacaaagaccgccaggtcatgaacatgtggagtgagcaggagaaggagaccttccgggagaagttcatgcagcatcccaagaactttggcctgatcgcatcattcctggagaggaagacagtggctgagtgcgtcctctattactacctgactaagaagaatgagaactataagagcctggtgagacggagctatcggcgccgcggcaagagccagcagcagcaacaacagcagcagcagcagcagcagcagcagcagcagcagcccatgccccgcagcagccaggaggagaaagatgagaaggagaaggaaaaggaggcggagaaggaggaggagaagccggaggtggagaacgacaaggaagacctcctcaaggagaagacagacgacacctcaggggaggacaacgacgagaaggaggctgtggcctccaaaggccgcaaaactgccaacagccagggaagacgcaaaggccgcatcacccgctcaatggctaatgaggccaacagcgaggaggccatcaccccccagcagagcgccgagctggcctccatggagctgaatgagagttctcgctggacagaagaagaaatggaaacagccaagaaaggtctcctggaacacggccgcaactggtcggccatcgcccggatggtgggctccaagactgtgtcgcagtgtaagaacttctacttcaactacaagaagaggcagaacctcgatgagatcttgcagcagcacaagctgaagatggagaaggagaggaacgcgcggaggaagaagaagaaagcgccggcggcggccagcgaggaggctgcattcccgcccgtggtggaggatgaggagatggaggcgtcgggcgtgagcggaaatgaggaggagatggtggaggaggctgaagccttacatgcctctgggaatgaggtgcccagaggggaatgcagtggcccagccactgtcaacaacagctcagacaccgagagcatcccctctcctcacactgaggccgccaaggacacagggcagaatgggcccaagcccccagccaccctgggcgccgacgggccacccccagggccacccaccccaccaccggaggacatcccggcccccactgagcccaccccggcctctgaagccaccggagcccctacgcccccaccagcacccccatcgccctctgcacctcctcctgtggtccccaaggaggagaaggaggaggagaccgcagcagcgcccccagtggaggagggggaggagcagaagccccccgcggctgaggagctggcagtggacacagggaaggccgaggagcccgtcaagagcgagtgcacggaggaagccgaggaggggccggccaagggcaaggacgcggaggccgctgaggccacggccgagggggcgctcaaggcagagaagaaggagggcgggagcggcagggccaccacagccaagagctcgggcgccccccaggacagcgactccagtgctacctgcagtgcagacgaggtggatgaggccgagggcggcgacaagaaccggctgctgtccccaaggcccagcctcctcaccccgactggcgacccccgggccaatgcctcaccccagaagccactggacctgaagcagctgaagcagcgagcggctgccatcccccccatcgtcaccaaagtccatgagcccccccgggaggacgcagctcccaccaagccagctcccccagccccaccgccaccgcaaaacctgcagccggagagcgacgcccctcagcagcctggcagcagcccccggggcaagagcaggagcccggcaccccccgccgacaaggaggcagagaagcctgtgttcttcccagccttcgcagccgaggcccagaagctgcctggggaccccccttgctggacttccggcctgcccttccccgtgcccccccgtgaggtgatcaaggcctccccgcatgccccggacccctcagccttctcctacgctccacctggtcacccactgcccctgggcctccatgacactgcccggcccgtcctgccgcgcccacccaccatctccaacccgcctcccctcatctcctctgccaagcaccccagcgtcctcgagaggcaaataggtgccatctcccaaggaatgtcggtccagctccacgtcccgtactcagagcatgccaaggccccggtgggccctgtcaccatggggctgcccctgcccatggaccccaaaaagctggcacccttcagcggagtgaagcaggagcagctgtccccacggggccaggctgggccaccggagagcctgggggtgcccacagcccaggaggcgtccgtgctgagagggacagctctgggctcagttccgggcggaagcatcaccaaaggcattcccagcacacgggtgccctcggacagcgccatcacataccgcggctccatcacccacggcacgccagctgacgtcctgtacaagggcaccatcaccaggatcatcggcgaggacagcccgagtcgcttggaccgcggccgggaggacagcctgcccaagggccacgtcatctacgaaggcaagaagggccacgtcttgtcctatgagggtggcatgtctgtgacccagtgctccaaggaggacggcagaagcagctcaggacccccccatgagacggccgcccccaagcgcacctatgacatgatggagggccgcgtgggcagagccatctcctcagccagcatcgaaggtctcatgggccgtgccatcccgccggagcgacacagcccccaccacctcaaagagcagcaccacatccgcgggtccatcacacaagggatccctcggtcctacgtggaggcacaggaggactacctgcgtcgggaggccaagctcctaaagcgggagggcacgcctccgcccccaccgccctcacgggacctgaccgaggcctacaagacgcaggccctgggccccctgaagctgaagccggcccatgagggcctggtggccacggtgaaggaggcgggccgctccatccatgagatcccgcgcgaggagctgcggcacacgcccgagctgcccctggccccgcggccgctcaaggagggctccatcacgcagggcaccccgctcaagtacgacaccggcgcgtccaccactggctccaaaaagcacgacgtacgctccctcatcggcagccccggccggacgttcccacccgtgcacccgctggatgtgatggccgacgcccgggcactggaacgtgcctgctacgaggagagcctgaagagccggccagggaccgccagcagctcggggggctccattgcgcgcggcgccccggtcattgtgcctgagctgggtaagccgcggcagagccccctgacctatgaggaccacggggcaccctttgccggccacctcccacgaggttcgcccgtgaccacgcgggagcccacgccgcgcctgcaggagggcagcctttcgtccagcaaggcatcccaggaccgaaagctgacgtcgacgcctcgtgagatcgccaagtccccgcacagcaccgtgcccgagcaccacccacaccccatctcgccctatgagcacctgcttcggggcgtgagtggcgtggacctgtatcgcagccacatccccctggccttcgaccccacctccataccccgcggcatccctctggacgcagccgctgcctactacctgccccgacacctggcccccaaccccacctacccgcacctgtacccaccctacctcatccgcggctaccccgacacggcggcgctggagaaccggcagaccatcatcaatgactacatcacctcgcagcagatgcaccacaacgcggccaccgccatggcccagcgagctgatatgctgaggggcctctcgccccgcgagtcctcgctggcactcaactacgctgcgggtccccgaggcatcatcgacctgtcccaagtgccacacctgcctgtgctcgtgcccccgacaccaggcaccccagccaccgccatggaccgccttgcctacctccccaccgcgccccagcccttcagcagccgccacagcagctccccactctccccaggaggtccaacacacttgacaaaaccaaccaccacgtcctcgtccgagcgggagcgagaccgggatcgagagcgggaccgggatcgggagcgggaaaagtccatcctcacgtccaccacgacggtggagcacgcacccatctggagacctggtacagagcagagcagcggcagcagcggcgggggtgggggcccgccgctgccgcagccaaagctgctgccaaagccgcccagtttggcctagtgggagccgctgggctcggaggactcggagtcggagggcttggagttccaggtgttgggggccttggaggtatacctccagctgcagccgctaaagcagctaaatacggagtggcagcaagacctggcttcggattgtctcccattttcccaggtggggcctgcctggggaaagcttgtggccggaagagaaaatgagcttcctaggacccctgactcacgacctcatcaacgttggtgctactgcttggtggagaatgtaaaccctttgtaaccccatcccatgcccctccgactccccaccccaggagggaacgggcaggccgggcggccttgcagatccacagggcaaggaaacaagaggggagcggccaagtgccccgaccaggaggccccctacttcagaggcaagggccatgtggtcctggccccccaccccatcccttcccacctaggagctccccctccacacagcctccatctccaggggaacttggtgctacacgctggtgctcttatcttcctggggggagggaggagggaagggtggcccctcggggaaccccctacctggggctcctctaaagatggtgcagacacttcctgggcagtcccagctccccctgcccaccaggacccaccgttggctgccatccagttggtacccaagcacctgaagcctcaaagctggattcgctctagcatccctcctctcctgggtccacttggccgtctcctccccaccgatcgctgttccccacatctggggcgcttttgggttggaaaaccaccccacactgggaatagccaccttgcccttgtagaatccatccgcccatccgtccattcatccatcggtccgtccatccatgtccccagttgaccgcccggcaccactagctggctgggtgcacccaccatcaacctggttgacctgtcatggccgcctgtgccctgcctccacccccatcctacactcccccagggcgtgcggggctgtgcagactggggtgccaggcatctcctccccacccggggtgtccccacatgcagtactgtataccccccatccctccctcggtccactgaacttcagagcagttcccattcctgccccgcccatctttttgtgtctcgctgtgatagatcaataaatattttattttttgtcctggatatttggggattatttttgattgttgatattctcttttggttttattgttgtggttcattgaaaaaaaaagataatttttttttctgatccggggagctgtatccccagtagaaaaaacattttaatcactctaatataactctggatgaaacacacctttttttttaataagaaaagagaattaactgcttcagaaatgactaataaatgaaaaacctttaaaggaa

SEQ ID NO: 1063 - DNA, 7004 bp, Homo sapiens; identical to SEQ ID NO: 1062
  misc_feature (551)..(551): second gene starts at position 551

SEQ ID NO: 1064 - DNA, 7058 bp, Homo sapiens
  misc_feature (551)..(551): second gene starts at position 551
atgtcgggatccacacagcctgtggcacagacgtggagggccactgagccccgctacccgccccacagcctttcctacccagtgcagatcgcccggacgcacacggacgtcgggctcctggagtaccagcaccactcccgcgactatgcctcccacctgtcgcccggctccatcatccagccccagcggcggaggccctccctgctgtctgagttccagcccgggaatgaacggtcccaggagctccacctgcggccagagtcccactcatacctgcccgagctggggaagtcagagatggagttcattgaaagcaagcgccctcggctagagctgctgcctgaccccctgctgcgaccgtcacccctgctggccacgggccagcctgcgggatctgaagacctcaccaaggaccgtagcctgacgggcaagctggaaccggtgtctccccccagccccccgcacactgaccctgagctggagctggtgccgccacggctgtccaaggaggagctgatccagaacatggaccgcgtggaccgagagatcaccatggtagagcagcagatctctaagctgaagaagaagcagcaacagctggaggaggaggctgccaagccgcccgagcctgagaagcccgtgtcaccgccgcccatcgagtcgaagcaccgcagcctggtgcagatcatctacgacgagaaccggaagaaggctgaagctgcacatcggattctggaaggcctggggccccaggtggagctgccgctgtacaaccagccctccgacacccggcagtatcatgagaacatcaaaataaaccaggcgatgcggaagaagctaatcttgtacttcaagaggaggaatcacgctcggaaacaatgggagcagaagttctgccagcgctatgaccagctcatggaggcctgggagaagaaggtggagcgcatcgagaacaacccccggcggcgggccaaggagagcaaggtgcgcgagtactacgagaagcagttccctgagatccgcaagcagcgcgagctgcaggagcgcatgcagagcagggtgggccagcggggcagtgggctgtccatgtcggccgcccgcagcgagcacgaggtgtcagagatcatcgatggcctctcagagcaggagaacctggagaagcagatgcgccagctggccgtgatcccgcccatgctgtacgacgctgaccagcagcgcatcaagttcatcaacatgaacgggcttatggccgaccccatgaaggtgtacaaagaccgccaggtcatgaacatgtggagtgagcaggagaaggagaccttccgggagaagttcatgcagcatcccaagaactttggcctgatcgcatcattcctggagaggaagacagtggctgagtgcgtcctctattactacctgactaagaagaatgagaactataagagcctggtgagacggagctatcggcgccgcggcaagagccagcagcagcaacaacagcagcagcagcagcagcagcagcagcagcagcagcccatgccccgcagcagccaggaggagaaagatgagaaggagaaggaaaaggaggcggagaaggaggaggagaagccggaggtggagaacgacaaggaagacctcctcaaggagaagacagacgacacctcaggggaggacaacgacgagaaggaggctgtggcctccaaaggccgcaaaactgccaacagccagggaagacgcaaaggccgcatcacccgctcaatggctaatgaggccaacagcgaggaggccatcaccccccagcagagcgccgagctggcctccatggagctgaatgagagttctcgctggacagaagaagaaatggaaacagccaagaaaggtctcctggaacacggccgcaactggtcggccatcgcccggatggtgggctccaagactgtgtcgcagtgtaagaacttctacttcaactacaagaagaggcagaacctcgatgagatcttgcagcagcacaagctgaagatggagaaggagaggaacgcgcggaggaagaagaagaaagcgccggcggcggccagcgaggaggctgcattcccgcccgtggtggaggatgaggagatggaggcgtcgggcgtgagcggaaatgaggaggagatggtggaggaggctgaagccttacatgcctctgggaatgaggtgcccagaggggaatgcagtggcccagccactgtcaacaacagctcagacaccgagagcatcccctctcctcacactgaggccgccaaggacacagggcagaatgggcccaagcccccagccaccctgggcgccgacgggccacccccagggccacccaccccaccaccggaggacatcccggcccccactgagcccaccccggcctctgaagccaccggagcccctacgcccccaccagcacccccatcgccctctgcacctcctcctgtggtccccaaggaggagaaggaggaggagaccgcagcagcgcccccagtggaggagggggaggagcagaagccccccgcggctgaggagctggcagtggacacagggaaggccgaggagcccgtcaagagcgagtgcacggaggaagccgaggaggggccggccaagggcaaggacgcggaggccgctgaggccacggccgagggggcgctcaaggcagagaagaaggagggcgggagcggcagggccaccacagccaagagctcgggcgccccccaggacagcgactccagtgctacctgcagtgcagacgaggtggatgaggccgagggcggcgacaagaaccggctgctgtccccaaggcccagcctcctcaccccgactggcgacccccgggccaatgcctcaccccagaagccactggacctgaagcagctgaagcagcgagcggctgccatcccccccatcgtcaccaaagtccatgagcccccccgggaggacgcagctcccaccaagccagctcccccagccccaccgccaccgcaaaacctgcagccggagagcgacgcccctcagcagcctggcagcagcccccggggcaagagcaggagcccggcaccccccgccgacaaggaggcagagaagcctgtgttcttcccagccttcgcagccgaggcccagaagctgcctggggaccccccttgctggacttccggcctgcccttccccgtgcccccccgtgaggtgatcaaggcctccccgcatgccccggacccctcagccttctcctacgctccacctggtcacccactgcccctgggcctccatgacactgcccggcccgtcctgccgcgcccacccaccatctccaacccgcctcccctcatctcctctgccaagcaccccagcgtcctcgagaggcaaataggtgccatctcccaaggaatgtcggtccagctccacgtcccgtactcagagcatgccaaggccccggtgggccctgtcaccatggggctgcccctgcccatggaccccaaaaagctggcacccttcagcggagtgaagcaggagcagctgtccccacggggccaggctgggccaccggagagcctgggggtgcccacagcccaggaggcgtccgtgctgagagggacagctctgggctcagttccgggcggaagcatcaccaaaggcattcccagcacacgggtgccctcggacagcgccatcacataccgcggctccatcacccacggcacgccagctgacgtcctgtacaagggcaccatcaccaggatcatcggcgaggacagcccgagtcgcttggaccgcggccgggaggacagcctgcccaagggccacgtcatctacgaaggcaagaagggccacgtcttgtcctatgagggtggcatgtctgtgacccagtgctccaaggaggacggcagaagcagctcaggacccccccatgagacggccgcccccaagcgcacctatgacatgatggagggccgcgtgggcagagccatctcctcagccagcatcgaaggtctcatgggccgtgccatcccgccggagcgacacagcccccaccacctcaaagagcagcaccacatccgcgggtccatcacacaagggatccctcggtcctacgtggaggcacaggaggactacctgcgtcgggaggccaagctcctaaagcgggagggcacgcctccgcccccaccgccctcacgggacctgaccgaggcctacaagacgcaggccctgggccccctgaagctgaagccggcccatgagggcctggtggccacggtgaaggaggcgggccgctccatccatgagatcccgcgcgaggagctgcggcacacgcccgagctgcccctggccccgcggccgctcaaggagggctccatcacgcagggcaccccgctcaagtacgacaccggcgcgtccaccactggctccaaaaagcacgacgtacgctccctcatcggcagccccggccggacgttcccacccgtgcacccgctggatgtgatggccgacgcccgggcactggaacgtgcctgctacgaggagagcctgaagagccggccagggaccgccagcagctcggggggctccattgcgcgcggcgccccggtcattgtgcctgagctgggtaagccgcggcagagccccctgacctatgaggaccacggggcaccctttgccggccacctcccacgaggttcgcccgtgaccacgcgggagcccacgccgcgcctgcaggagggcagcctttcgtccagcaaggcatcccaggaccgaaagctgacgtcgacgcctcgtgagatcgccaagtccccgcacagcaccgtgcccgagcaccacccacaccccatctcgccctatgagcacctgcttcggggcgtgagtggcgtggacctgtatcgcagccacatccccctggccttcgaccccacctccataccccgcggcatccctctggacgcagccgctgcctactacctgccccgacacctggcccccaaccccacctacccgcacctgtacccaccctacctcatccgcggctaccccgacacggcggcgctggagaaccggcagaccatcatcaatgactacatcacctcgcagcagatgcaccacaacgcggccaccgccatggcccagcgagctgatatgctgaggggcctctcgccccgcgagtcctcgctggcactcaactacgctgcgggtccccgaggcatcatcgacctgtcccaagtgccacacctgcctgtgctcgtgcccccgacaccaggcaccccagccaccgccatggaccgccttgcctacctccccaccgcgccccagcccttcagcagccgccacagcagctccccactctccccaggaggtccaacacacttgacaaaaccaaccaccacgtcctcgtccgagcgggagcgagaccgggatcgagagcgggaccgggatcgggagcgggaaaagtccatcctcacgtccaccacgacggtggagcacgcacccatctggagacctggtacagagcagagcagcggcagcagcggcgggggtgggggcccgccgctgccgcagccaaagctgctgccaaagccgcccagtttggcctagtgggagccgctgggctcggaggactcggagtcggagggcttggagttccaggtgttgggggccttggaggtatacctccagctgcagccgctaaagcagctaaatacggtgctgctggccttggaggtgtcctagggggtgccgggcagttcccacttggaggagtggcagcaagacctggcttcggattgtctcccattttcccaggtggggcctgcctggggaaagcttgtggccggaagagaaaatgagcttcctaggacccctgactcacgacctcatcaacgttggtgctactgcttggtggagaatgtaaaccctttgtaaccccatcccatgcccctccgactccccaccccaggagggaacgggcaggccgggcggccttgcagatccacagggcaaggaaacaagaggggagcggccaagtgccccgaccaggaggccccctacttcagaggcaagggccatgtggtcctggccccccaccccatcccttcccacctaggagctccccctccacacagcctccatctccaggggaacttggtgctacacgctggtgctcttatcttcctggggggagggaggagggaagggtggcccctcggggaaccccctacctggggctcctctaaagatggtgcagacacttcctgggcagtcccagctccccctgcccaccaggacccaccgttggctgccatccagttggtacccaagcacctgaagcctcaaagctggattcgctctagcatccctcctctcctgggtccacttggccgtctcctccccaccgatcgctgttccccacatctggggcgcttttgggttggaaaaccaccccacactgggaatagccaccttgcccttgtagaatccatccgcccatccgtccattcatccatcggtccgtccatccatgtccccagttgaccgcccggcaccactagctggctgggtgcacccaccatcaacctggttgacctgtcatggccgcctgtgccctgcctccacccccatcctacactcccccagggcgtgcggggctgtgcagactggggtgccaggcatctcctccccacccggggtgtccccacatgcagtactgtataccccccatccctccctcggtccactgaacttcagagcagttcccattcctgccccgcccatctttttgtgtctcgctgtgatagatcaataaatattttattttttgtcctggatatttggggattatttttgattgttgatattctcttttggttttattgttgtggttcattgaaaaaaaaagataatttttttttctgatccggggagctgtatccccagtagaaaaaacattttaatcactctaatataactctggatgaaacacacctttttttttaataagaaaagagaattaactgcttcagaaatgactaataaatgaaaaacctttaaaggaa

SEQ ID NO: 1065 - DNA, 7004 bp, Homo sapiens; identical to SEQ ID NO: 1062
  misc_feature (551)..(551): second gene starts at position 551

SEQ ID NO: 1066 - DNA, 7058 bp, Homo sapiens; identical to SEQ ID NO: 1064
  misc_feature (551)..(551): second gene starts at position 551

SEQ ID NO: 1067 - DNA, 2842 bp, Homo sapiens
  misc_feature (1061)..(1061): second gene starts at position 1061
atggccgtcatggcgccccgaaccctcctcctgctactctcgggggccctggccctgacccagacctgggcgggctcccactccatgaggtatttcttcacatccgtgtcccggcccggccgcggggagccccgcttcatcgccgtgggctacgtggacgacacgcagttcgtgcggttcgacagcgacgccgcgagccagaggatggagccgcgggcgccgtggatagagcaggaggggccggagtattgggaccaggagacacggaatgtgaaggcccagtcacagactgaccgagtggacctggggaccctgcgcggctactacaaccagagcgaggccggttctcacaccatccagataatgtatggctgcgacgtggggtcggacgggcgcttcctccgcgggtaccggcaggacgcctacgacggcaaggattacatcgccctgaacgaggacctgcgctcttggaccgcggcggacatggcggctcagatcaccaagcgcaagtgggaggcggcccatgaggcggagcagttgagagcctacctggatggcacgtgcgtggagtggctccgcagatacctggagaacgggaaggagacgctgcagcgcacggacccccccaagacacatatgacccaccaccccatctctgaccatgaggccaccctgaggtgctgggccctgggcttctaccctgcggagatcacactgacctggcagcgggatggggaggaccagacccaggacacggagctcgtggagaccaggcctgcaggggatggaaccttccagaagtgggcggctgtggtggtgccttctggagaggagcagagatacacctgccatgtgcagcatgagggtctgcccaagcccctcaccctgagatgggagctgtcttcccagcccaccatccccatcgtgggcatcattgctggcctggttctccttggagctgtgatcactggagctgtggtcgctgccgtgatgtggaggaggaagagctcagatagaaaaggagggagttacactcaggctgcaagcagtgacagtgcccgtgtccctggccagtgtccttccacctgtccacaagcatggggaacatcttcgccaacctcttcaagggcctttttggcaaaaaagaaatgcgcatcctcatggtgggcctggatgctgcagggaagaccacgatcctctacaagcttaagctgggtgagatcgtgaccaccattcccaccataggcttcaacgtggaaaccgtggagtacaagaacatcagcttcactgtgtgggacgtgggtggccaggacaagatccggcccctgtggcgccactacttccagaacacacaaggcctgatcttcgtggtggacagcaatgacagagagcgtgtgaacgaggcccgtgaggagctcatgaggatgctggccgaggacgagctccgggatgctgtcctcctggtgttcgccaacaagcaggacctccccaacgccatgaatgcggccgagatcacagacaagctggggctgcactcactacgccacaggaactggtacattcaggccacctgcgccaccagcggcgacgggctctatgaaggactggactggctgtccaatcagctccggaaccagaagtgaacgcgacccccctccctctcactcctcttgccctctgctttactctcatgtggcaaacgtgcggctcgtggtgtgagtgccagaagctgcctccgtggtttggtcaccgtgtgcatcgcaccgtgctgtaaatgtggcagacgcagcctgcggccaggctttttatttaatgtaaatagtttttgtttccaatgaggcagtttctggtactcctatgcaatattactcagctttttttattgtaaaaagaaaaatcaactcactgttcagtgctgagaggggatgtaggcccatgggcacctggcctccaggagtcgctgtgttgggagagccggccacgcccttggctttagagctgtgttgaaatccattttggtggttggtttttaacccaaactcagtgcattttttaaaatagttaagaatccaagtcgagaacacttgaacacacagaagggagaccccgcctagcatagatttgcagttacggcctggatgccagtcgccagcccagctgttcccctcgggaacatgaggtggtggtggcgcagcagactgcgatcaattctgcatggtcacagtagagatccccgcaactcgcttgtccttgggtcaccctgcattccatagccatgtgcttgtccctgtgctcccacggttcccaggggccaggctgggagcccacagccaccccactatgccgcaggccgccctacccaccttcaggcagcctatgggacgcagggccccatctgtccctcggtcgccgtgtggccagagtgggtccgtcgtccccaacactcgtgctcgctcagacactttggcaggatgtctggggcctcaccagcaggagcgcgtgcaagccgggcaggcggtccacctagacccacagcccctcgggagcaccccacctctgtgtgtgatgtagctttctctccctcagcctgcaagggtccgatttgccatcgaaaaagacaacctctacttttttcttttgtattttgataaacactgaagctggagctgttaaatttatcttggggaaacctcagaactggtctatttggtgtcgtggaacctcttactgctttcaatacacgattagtaatcaactgttttgtatacttgttttcagttttcatttcgacaaacaagcactgtaattatagctattagaataaaatctcttaactatttca

SEQ ID NO: 1068 - DNA, 2842 bp, Homo sapiens; identical to SEQ ID NO: 1067
  misc_feature (1061)..(1061): second gene starts at position 1061

SEQ ID NO: 1069 - DNA, 2842 bp, Homo sapiens; identical to SEQ ID NO: 1067
  misc_feature (1061)..(1061): second gene starts at position 1061

SEQ ID NO: 1070 - DNA, 2842 bp, Homo sapiens; identical to SEQ ID NO: 1067
  misc_feature (1061)..(1061): second gene starts at position 1061

SEQ ID NO: 1071 - DNA, 3500 bp, Homo sapiens
  misc_feature (431)..(431): second gene starts at position 431
atgaccactttaactcaccgggcccgtcgcactgaaataagcaagaactctgaaaagaagatggaaagtgaggaagacagtaattgggagaaaagtccagacaatgaagattctggagactctaaggatatccgccttactcttatggaagaagtattgcttctgggactaaaagataaagaggggtacacatctttctggaatgactgcatatcatcaggcctgcgagggggcatcctgatagagctggccatgcggggtcgaatctatctggaacccccgaccatgcgtaagaagcgactactagacagaaaggtactgctaaagtcagacagcccaacaggtgatgttttactggatgaaactctgaaacacatcaaagcaactgaacccacagaaactgtccaaacatggatagagctactcactgctggggccacaactttggtgaagaaggatatattcggatggcaagaaataaaggaaatcattgtgggattgctagctttccctcttacccagaaatctagaggatctctcctttttataacaaatcaagaaatatgaagcactttctcttaacttaatttttcctgctgtatccagaagaaataattgtgtcatgattaatgtgtatttactgtactaattagaaaatatagtttgaggccgggcacggtggctcacgcctgtaatcccagtacttgggaggccaaggcaggcatatcaacttgaggccaggagttaaagagcagcctggctaacatggtgaaaccccatctctactaaaaatacaaaaaattagccgagcacggtggtgcatgcctgtaatcccagctacttgggaggctgaggcacgagattccttgaacccaagaggttgaggctatgttgagctgagatcacaccactgtactccagcctggatgacagagtggagactctgtttcaaaaaaacagaaaagaaaatatagtttgattcttcatttttttaaatttgcaaatctcaggataaagtttgctaagtaaattagtaatgtactatagatataactgtacaaaaattgttcaacctaaaacaatctgtaattgcttattgttttattgtatactctttgtctttttaagacccctaatagccttttgtaacttgatggcttaaaaatacttaataaatctgccatttcaaatttctatcattgccacataccattcttattcctaggcaactattaataatctatcctgagaatattaattgtggtattctggtgatggggtttagcaactttgatggaagaaaatattaggctataaatgtcctaaggactcagattgtatctttgtacagaagaggattcaaaacgccacgtgtagtggctcatgcctgtaatcccaacactttgggaggctgaagtaggaggatcgtcttgagcccaggagttcaagaccagcctggacaacatagtgagaccttgtctccacaaaaataaaaaagaaactatccaggagtggtggtgtgtgcctgtggtccctgctatgcagatgtctaagacaggaggatcacaagagcccaggaggttgagaatgcagtgagcttgtaattgcaccactgcactccagcctgggtgacagagcaagaccctgtcttaaaaaaagaggattcaacacatatttttatattatgttaaagtaaagaaatgcataaaagacaagcactttggaagaattattttaatgatcaacaatttaatgtattagtccaaattatttttacgtagtcatcaacaatttgaccagggcctttatttggcaaataactgagccaaccagaataaaataaccaatactccactgctcatatttttatctaattcagatggatcttccttacaactgctctagattagtagatgcatctaagcaggcagcaggaactttaaattttttaagttcatgtctatgacatgaacaatgtgtgggataatgtcattaatatatcctaaattaacctaaacgtatttcactaactctggctccttctccataaagcacattttaaggaacaagaattgctaaatataaaaacataaataataccataatacatggctatcatcaaaagtgtatagaatattatagtttaaaagtatttagttgattacttttcagttttgttttgttttttgagacggagtctcactctgttgcccaggctggagtgcagtggcaccatctcagttcactgcaacttctgcctcccgagttcaagcgattctcctgcctcagcctcccgagtagctggaattataggcgtgcaccaccacgcccagctaatttttgtatttttagtaaagacagggttttgccacattagccaggctggtctcaaactcctgacctcaggtgatccacccaccccagcctcccaaagtgctaagattacaggcgtgagccactgagcccagcctacttttcagtttttaacataatttttgttttatccacaacttttcaagtattgaaagtagaataaaaacatgggttcttagtctttagctatctgttaaagcctatgaatgccttcttaaaatcatgtttttaaatgcataaaatatataggattacaaaggaatctaattatatcgaaatacagttattaaaatgttaaaagataagtttgttatatattaatatgcatgcttctttataaatgcattaaataagagttaatagctatcctaaatttgaaatagtgataagcataatgaaaatagatgcaaaaaactaatgtgatatgaaaatatctgggtttttcttttgatgatgaagtattgctaatattaccgtggtttatgaactatgttcagaattgaagaaaatcctaactttcagttagaggttagtgacggggttcaggacaccctacacaaaatacagcactttgacatattgaatattttaagctgaaggcatttgaggaaattgcagaagcaggaaggtgactctgaccttctgcctgctgttctccccagaagcagccataaaacctgggaaggattttctgaccttcccctgaagtagatcataagactgtcatgtaagaggtgctctcctggcacccagagaaaaggagcatccttacctccaaaagcacagggacacaaagaggaatctaaacaaacaggcctctcagtttcccccagtttattacatttagcttgttcacactttgccctatgacatttctacatcactggctgctcttcatcaaacctactataaaaaacattcaagttcaactgtttctttgggcctttatttccttatggagcccctcgtgtcgtgtaaaacttatattaaataaatgtgcatgcttttctcttgctaatctctcttttgttatagagatctcagccctaaacctaggatggatagaaggaaacatatgttctcccctacattagtaaaaataaaaatggaattttttacccatacaa

SEQ ID NO: 1072 - DNA, 2880 bp, Homo sapiens
  misc_feature (1104)..(1104): second gene starts at position 1104
atgctgctatccgtgccgctgctgctcggcctcctcggcctggccgtcgccgagcctgccgtctacttcaaggagcagtttctggacggagacgggtggacttcccgctggatcgaatccaaacacaagtcagattttggcaaattcgttctcagttccggcaagttctacggtgacgaggagaaagataaaggtttgcagacaagccaggatgcacgcttttatgctctgtcggccagtttcgagcctttcagcaacaaaggccagacgctggtggtgcagttcacggtgaaacatgagcagaacatcgactgtgggggcggctatgtgaagctgtttcctaatagtttggaccagacagacatgcacggagactcagaatacaacatcatgtttggtcccgacatctgtggccctggcaccaagaaggttcatgtcatcttcaactacaagggcaagaacgtgctgatcaacaaggacatccgttgcaaggatgatgagtttacacacctgtacacactgattgtgcggccagacaacacctatgaggtgaagattgacaacagccaggtggagtccggctccttggaagacgattgggacttcctgccacccaagaagataaaggatcctgatgcttcaaaaccggaagactgggatgagcgggccaagatcgatgatcccacagactccaagcctgaggactgggacaagcccgagcatatccctgaccctgatgctaagaagcccgaggactgggatgaagagatggacggagagtgggaacccccagtgattcagaaccctgagtacaagggtgagtggaagccccggcagatcgacaacccagattacaagggcacttggatccacccagaaattgacaaccccgagtattctcccgatcccagtatctatgcctatgataactttggcgtgctgggcctggacctctggcaggtcaagtctggcaccatctttgacaacttcctcatcaccaacgatgaggcatacgctgaggagtttggcaacgagacgtggggcgtaacaaaggcagcagagaaacaaatgaaggacaaacaggacgaggagcagaggcttaaaggaggaggaagagcctgtcaaagaagcacctggaaaacgaaagaaggaaatggccaaacagaaagcagctcctgaagccaagaaacagaaagtggaaggcacagaaccgactacggctttcaatctctttgttggaaacctaaactttaacaaatctgctcctgaattaaaaactggtatcagcgatgtttttgctaaaaatgatcttgctgttgtggatgtcagaattggtatgactaggaaatttggttatgtggattttgaatctgctgaagacctggagaaagcgttggaactcactggtttgaaagtctttggcaatgaaattaaactagagaaaccaaaaggaaaagacagtaagaaagagcgagatgcgagaacacttttggctaaaaatctcccttacaaagtcactcaggatgaattgaaagaagtgtttgaagatgctgcggagatcagattagtcagcaaggatgggaaaagtaaagggattgcttatattgaatttaagacagaagctgatgcagagaaaacctttgaagaaaagcagggaacagagatcgatgggcgatctatttccctgtactatactggagagaaaggtcaaaatcaagactatagaggtggaaagaatagcacttggagtggtgaatcaaaaactctggttttaagcaacctctcctacagtgcaacagaagaaactcttcaggaagtatttgagaaagcaacttttatcaaagtaccccagaaccaaaatggcaaatctaaagggtatgcatttatagagtttgcttcattcgaagacgctaaagaagctttaaattcctgtaataaaagggaaattgagggcagagcaatcaggctggagttgcaaggacccaggggatcacctaatgccagaagccagccatccaaaactctgtttgtcaaaggcctgtctgaggataccactgaagagacattaaaggagtcatttgacggctccgttcgggcaaggatagttactgaccgggaaactgggtcctccaaagggtttggttttgtagacttcaacagtgaggaggatgccaaagctgccaaggaggccatggaagacggtgaaattgatggaaataaagttaccttggactgggccaaacctaagggtgaaggtggcttcgggggtcgtggtggaggcagaggcggctttggaggacgaggtggtggtagaggaggccgaggaggatttggtggcagaggccggggaggctttggagggcgaggaggcttccgaggaggcagaggaggaggaggtgaccacaagccacaaggaaagaagacgaagtttgaatagcttctgtccctctgctttcccttttccatttgaaagaaaggactctggggtttttactgttacctgatcaatgacagagccttctgaggacattccaagacagtatacagtcctgtggtctccttggaaatccgtctagttaacatttcaagggcaataccgtgttggttttgactggatattcatataaactttttaaagagttgagtgatagagctaacccttatctgtaagttttgaatttatattgtttcatcccatgtacaaaaccattttttcctacaaatagtttgggttttgttgttgtttcttttttttgttttgtttttgttttttttttttttgcgttcgtggggttgtaaaagaaaagaaagcagaatgttttatcatggtttttgcttcagcggctttaggacaaattaaaagtcaactctggtgccaga

SEQ ID NO: 1073 - DNA, 2880 bp, Homo sapiens; identical to SEQ ID NO: 1072
  misc_feature (1104)..(1104): second gene starts at position 1104

SEQ ID NO: 1074 - DNA, 3220 bp, Homo sapiens
  misc_feature (1197)..(1197): second gene starts at position 1197
atgctgctatccgtgccgctgctgctcggcctcctcggcctggccgtcgccgagcctgccgtctacttcaaggagcagtttctggacggagacgggtggacttcccgctggatcgaatccaaacacaagtcagattttggcaaattcgttctcagttccggcaagttctacggtgacgaggagaaagataaaggtttgcagacaagccaggatgcacgcttttatgctctgtcggccagtttcgagcctttcagcaacaaaggccagacgctggtggtgcagttcacggtgaaacatgagcagaacatcgactgtgggggcggctatgtgaagctgtttcctaatagtttggaccagacagacatgcacggagactcagaatacaacatcatgtttggtcccgacatctgtggccctggcaccaagaaggttcatgtcatcttcaactacaagggcaagaacgtgctgatcaacaaggacatccgttgcaaggatgatgagtttacacacctgtacacactgattgtgcggccagacaacacctatgaggtgaagattgacaacagccaggtggagtccggctccttggaagacgattgggacttcctgccacccaagaagataaaggatcctgatgcttcaaaaccggaagactgggatgagcgggccaagatcgatgatcccacagactccaagcctgaggactgggacaagcccgagcatatccctgaccctgatgctaagaagcccgaggactgggatgaagagatggacggagagtgggaacccccagtgattcagaaccctgagtacaagggtgagtggaagccccggcagatcgacaacccagattacaagggcacttggatccacccagaaattgacaaccccgagtattctcccgatcccagtatctatgcctatgataactttggcgtgctgggcctggacctctggcaggtcaagtctggcaccatctttgacaacttcctcatcaccaacgatgaggcatacgctgaggagtttggcaacgagacgtggggcgtaacaaaggcagcagagaaacaaatgaaggacaaacaggacgaggagcagaggcttaaggaggaggaagaagacaagaaacgcaaagaggaggaggaggcagaggacaaggaggatgatgaggacaaagatgaggatgaggaggatgaggagaggatgaggacgatgaggatgacgaagatgatgaggatgacgatgacgatgaggaagatgactctgaagaagaagctatggagactacaccagccaaaggaaagaaagctgcaaaagttgttcctgtgaaagccaagaacgtggctgaggatgaagatgaagaagaggatgatgaggacgaggatgacgacgacgacgaagatgatgaagatgatgatgatgaagatgatgaggaggaggaagaagaggaggaggaagagcctgtcaaagaagcacctggaaaacgaaagaaggaaatggccaaacagaaagcagctcctgaagccaagaaacagaaagtggaaggcacagaaccgactacggctttcaatctctttgttggaaacctaaactttaacaaatctgctcctgaattaaaaactggtatcagcgatgtttttgctaaaaatgatcttgctgttgtggatgtcagaattggtatgactaggaaatttggttatgtggattttgaatctgctgaagacctggagaaagcgttggaactcactggtttgaaagtctttggcaatgaaattaaactagagaaaccaaaaggaaaagacagtaagaaagagcgagatgcgagaacacttttggctaaaaatctcccttacaaagtcactcaggatgaattgaaagaagtgtttgaagatgctgcggagatcagattagtcagcaaggatgggaaaagtaaagggattgcttatattgaatttaagacagaagctgatgcagagaaaacctttgaagaaaagcagggaacagagatcgatgggcgatctatttccctgtactatactggagagaaaggtcaaaatcaagactatagaggtggaaagaatagcacttggagtggtgaatcaaaaactctggttttaagcaacctctcctacagtgcaacagaagaaactcttcaggaagtatttgagaaagcaacttttatcaaagtaccccagaaccaaaatggcaaatctaaagggtatgcatttatagagtttgcttcattcgaagacgctaaagaagctttaaattcctgtaataaaagggaaattgagggcagagcaatcaggctggagttgcaaggacccaggggatcacctaatgccagaagccagccatccaaaactctgtttgtcaaaggcctgtctgaggataccactgaagagacattaaaggagtcatttgacggctccgttcgggcaaggatagttactgaccgggaaactgggtcctccaaagggtttggttttgtagacttcaacagtgaggaggatgccaaagctgccaaggaggccatggaagacggtgaaattgatggaaataaagttaccttggactgggccaaacctaagggtgaaggtggcttcgggggtcgtggtggaggcagaggcggctttggaggacgaggtggtggtagaggaggccgaggaggatttggtggcagaggccggggaggctttggagggcgaggaggcttccgaggaggcagaggaggaggaggtgaccacaagccacaaggaaagaagacgaagtttgaatagcttctgtccctctgctttcccttttccatttgaaagaaaggactctggggtttttactgttacctgatcaatgacagagccttctgaggacattccaagacagtatacagtcctgtggtctccttggaaatccgtctagttaacatttcaagggcaataccgtgttggttttgactggatattcatataaactttttaaagagttgagtgatagagctaacccttatctgtaagttttgaatttatattgtttcatcccatgtacaaaaccattttttcctacaaatagtttgggttttgttgttgtttcttttttttgttttgtttttgttttttttttttttgcgttcgtggggttgtaaaagaaaagaaagcagaatgttttatcatggtttttgcttcagcggctttaggacaaattaaaagtcaactctggtgccaga

SEQ ID NO: 1075 - DNA, 3220 bp, Homo sapiens; identical to SEQ ID NO: 1074
  misc_feature (1197)..(1197): second gene starts at position 1197

SEQ ID NO: 1076 - DNA, 2397 bp, Homo sapiens
  misc_feature (419)..(419): second gene starts at position 419
atgcaaaacaacgaaattataaagcctgccaaatacttctcagaattggaaaagagcatcctgctggctttagtagaaaagtataaatatgtgctggaatgtaagaaaagtgatgcgcgaactattgcccttaagcagcgtacctggcaggcgctggcccacgaatacaactctcagcccagcgtgtccctgcgggatttcaaacagctgaagaagtgctgggagaacatcaaggctcggaccaaaaaaattatggcccatgaaaggagagagaaagtgaaacggagcgtcagccctctcctgagtacccacgtcctagggaaggagaagatcgccagcatgctgccggagcagctctacttcctgcagagccccccggaggaggagcccgaataccaccccgacgcctcagcccaagaattaaatgtgagggagtctgacgtaagagtttgtgatgagtcatcatgtaaatatggaggagtctgtaaagaagatggagatggtttgaaatgtgcatgccaatttcagtgccatacaaattatattcctgtctgtggatcaaatggggacacttatcaaaatgaatgctttctcagaagggctgcttgtaagcaccagaaagagataacagtaatagcaagaggaccatgctactctgataatggatctggatctggagaaggagaagaggaagggtcaggggcagaagttcacagaaaacactccaagtgtggaccctgcaaatataaagctgagtgtgatgaagatgcagaaaatgttgggtgtgtatgtaatatagattgcagtggatacagttttaatcctgtgtgtgcttctgatgggagttcctataacaatccctgttttgttcgagaagcatcttgtataaagcaagaacaaattgatataaggcatcttggtcattgcacagatacagatgacactagtttgttgggaaagaaagatgatggactacaatatcgaccagatgtgaaagatgctagtgatcaaagagaagatgtttatattggaaaccacatgccttgccctgaaaacctcaatggttactgcatccatggaaaatgtgaattcatctattctactcagaaggcttcttgtagatgtgaatctggctacactggacagcactgtgaaaagacagactttagtattctctatgtagtgccaagtaggcaaaagctcactcatgttcttattgcagcaattattggagctgtacagattgccatcatagtagcaattgtaatgtgcataacaagaaaatgccccaaaaacaatagaggacgtcgacagaagcaaaacctaggtcattttacttcagatacgtcatccagaatggtttaaactgatgacttttatatgtacactgaccatgtgatgtacatttattatgtctttttttaaagaatggaaatatttatttcagaggccttatttttggacatttttagtgtagtactgttggctcgtatttagaatattcagctacgacagttttggactgtttagtagtctttgttttatgtttttaaatacagaaattgctttcacaaatttgtaccacatggtaattctaagacttgttctttacccatggaatgtaatatttttgcaaagatggactacttcacaaatggttataaagtcatatccacttcttccacaatgaccacagcaaatgaccaagcatgaactaaaggtaaagatgtttacagattacttttcttacaaaaaaaatctagaagacactgtgtttaaatagatatttaaatgtttttgagatttagtaactgattttttagacactgcctatcgcatgaactgtaaagctgtgtgtattaggtgtaaaatatttataagatatatggactggggaatttgattattcctccctttgaaaaaatagtcctaataatttgaacaaatatgttagtaatgatggaacagatcaatgaaaagtagatatagatattgtgaaaataggctgtttaacaaacagattggaataaagcctattctaccagttaaactactttaatacacattcatttttaaagaaaatgtttgttttaacataaataaacaaatcgtatcagtgtttgtgaataaaatacaaaaatgattgttaatgattggtgctcttaaagtgagcttaaaatttatccaagacgtatatccaaatttgtcctgtagtaatagattaatattcatagattgttggtgtttaaagatctgaagtgtgagtagaatgtattcagctgtttaacatgtagtttagatattcaaaagtatgcatgtagaatttaaagaatatgttaaaaattattaattttaatattttgtttggaaaagcatgttataatataatgttttcac

SEQ ID NO: 1077 - DNA, 2397 bp, Homo sapiens; identical to SEQ ID NO: 1076
  misc_feature (419)..(419): second gene starts at position 419

SEQ ID NO: 1078 - DNA, 2397 bp, Homo sapiens; identical to SEQ ID NO: 1076
  misc_feature (419)..(419): second gene starts at position 419

SEQ ID NO: 1079 - DNA, 2397 bp, Homo sapiens; identical to SEQ ID NO: 1076
  misc_feature (419)..(419): second gene starts at position 419

SEQ ID NO: 1080 - DNA, 2397 bp, Homo sapiens; identical to SEQ ID NO: 1076
  misc_feature (419)..(419): second gene starts at position 419

SEQ ID NO: 1081 - DNA, 2397 bp, Homo sapiens; identical to SEQ ID NO: 1076
  misc_feature (419)..(419): second gene starts at position 419

SEQ ID NO: 1082 - DNA, 32765 bp, Homo sapiens
  misc_feature (234)..(234): second gene starts at position 234
atggcacagcaagctgccgataagtatctctatgtggataaaaacttcatcaacaatccgctggcccaggccgactgggctgccaagaagctggtatgggtgccttccgacaagagtggctttgagccagccagcctcaaggaggaggtgggcgaagaggccatcgtggagctggtggagaatgggaagaaggtgaaggtgaacaaggatgacatccagaagatgaacccgcccaagttctccaaggtggaggacatggcagagctcacgtgcctcaacgaagcctcggtgctgcacaacctcaaggagcgttactactcagggctcatctacacctattcaggcctgttctgtgtggtcatcaatccttacaagaacctgcccatctactctgaagagattgtggaaatgtacaagggcaagaagaggcacgagatgccccctcacatctatgccatcacagacaccgcctacaggagtatgatgcaagaccgagaagatcaatccatcttgtgcactggtgaatctggagctggcaagacggagaacaccaagaaggtcatccagtatctggcgtacgtggcgtcctcgcacaagagcaagaaggaccagggcgagctggagcggcagctgctgcaggccaaccccatcctggaggccttcgggaacgccaagaccgtgaagaatgacaactcctcccgcttcggcaaattcattcgcatcaactttgatgtcaatggctacattgttggagccaacattgagacttatcttttggagaaatctcgtgctatccgccaagccaaggaagaacggaccttccacatcttctattatctcctgtctggggctggagagcacctgaagaccgatctcctgttggagccgtacaacaaataccgcttcctgtccaatggacacgtcaccatccccgggcagcaggacaaggacatgttccaggagaccatggaggccatgaggattatgggcatcccagaagaggagcaaatgggcctgctgcgggtcatctcaggggttcttcagctcggcaacatcgtcttcaagaaggagcggaacactgaccaggcgtccatgcccgacaacacagctgcccaaaaggtgtcccatctcttgggtatcaatgtgaccgatttcaccagaggaatcctcaccccgcgcatcaaggtgggacgggattacgtccagaaggcgcagactaaagagcaggctgactttgccatcgaggccttggccaaggcgacctatgagcggatgttccgctggctggtgctgcgcatcaacaaggctctggacaagaccaagaggcagggcgcctccttcatcgggatcctggacattgccggcttcgagatctttgatctgaactcgtttgagcagctgtgcatcaattacaccaatgagaagctgcagcagctcttcaaccacaccatgttcatcctggagcaggaggagtaccagcgcgagggcatcgagtggaacttcatcgactttggcctcgacctgcagccctgcatcgacctcattgagaagccagcaggccccccgggcattctggccctgctggacgaggagtgctggttccccaaagccaccgacaagagcttcgtggagaaggtgatgcaggagcagggcacccaccccaagttccagaagcccaagcagctgaaggacaaagctgatttctgcattatccactatgccggcaaggtggattacaaagctgacgagtggctgatgaagaacatggatcccctgaatgacaacatcgccacactgctccaccagtcctctgacaagtttgtctcggagctgtggaaggatgtggaccgcatcatcggcctggaccaggtggccggcatgtcggagaccgcactgcccggggccttcaagacgcggaagggcatgttccgcactgtggggcagctttacaaggagcagctggccaagctgatggctacgctgaggaacacgaaccccaactttgtccgctgcatcatccccaaccacgagaagaaggccggcaagctggacccgcatctcgtgctggaccagctgcgctgcaacggtgttctcgagggcatccgtatctgccgccagggcttccccaacagggtggtcttccaggagtttcggcagagatatgagatcctgactccaaactccattcccaagggtttcatggacgggaagcaggcgtgcgtgctcatgataaaagccctggagctcgacagcaatctgtaccgcattggccagagcaaagtcttcttccgtgccggtgtgctggcccacctggaggaggagcgagacctgaagatcaccgacgtcatcatagggttccaggcctgctgcaggggctacctggccaggaaagcatttgccaagcggcagcagcagcttaccgccatgaaggtcctccagcggaactgcgctgcctacctgaagctgcggaactggcagtggtggcggctcttcaccaaggtcaagccgctgctgcaggtgagccggcaggaggaggagatgatggccaaggaggaggagctggtgaaggtcagagagaagcagctggctgcggagaacaggctcacggagatggagacgctgcagtctcagctcatggcagagaaattgcagctgcaggagcagctccaggcagaaaccgagctgtgtgccgaggctgaggagctccgggcccgcctgaccgccaagaagcaggaattagaagagatctgccatgacctagaggccagggtggaggaggaggaggagcgctgccagcacctgcaggcggagaagaagaagatgcagcagaacatccaggagcttgaggagcagctggaggaggaggagagcgcccggcagaagctgcagctggagaaggtgaccaccgaggcgaagctgaaaaagctggaggaggagcagatcatcctggaggaccagaactgcaagctggccaaggaaaagaaactgctggaagacagaatagctgagttcaccaccaacctcacagaagaggaggagaaatctaagagcctcgccaagctcaagaacaagcatgaggcaatgatcactgacttggaagagcgcctccgcagggaggagaagcagcgacaggagctggagaagacccgccggaagctggagggagactccacagacctcagcgaccagatcgccgagctccaggcccagatcgcggagctcaagatgcagctggccaagaaagaggaggagctccaggccgccctggccagagtggaagaggaagctgcccagaagaacatggccctcaagaagatccgggagctggaatctcagatctctgaactccaggaagacctggagtctgagcgtgcttccaggaataaagctgagaagcagaaacgggaccttggggaagagctagaggctctgaaaacagagttggaggacacgctggattccacagctgcccagcaggagctcaggtcaaaacgtgagcaggaggtgaacatcctgaagaagaccctggaggaggaggccaagacccacgaggcccagatccaggagatgaggcagaagcactcacaggccgtggaggagctggcggagcagctggagcagacgaagcgggtgaaagcaaacctcgagaaggcaaagcagactctggagaacgagcggggggagctggccaacgaggtgaaggtgctgctgcagggcaaaggggactcggagcacaagcgcaagaaagtggaggcgcagctgcaggagctgcaggtcaagttcaacgagggagagcgcgtgcgcacagagctggccgacaaggtcaccaagctgcaggtggagctggacaacgtgaccgggcttctcagccagtccgacagcaagtccagcaagctcaccaaggacttctccgcgctggagtcccagctgcaggacactcaggagctgctgcaggaggagaaccggcagaagctgagcctgagcaccaagctcaagcaggtggaggacgagaagaattccttccgggagcagctggaggaggaggaggaggccaagcacaacctggagaagcagatcgccaccctccatgcccaggtggccgacatgaaaaagaagatggaggacagtgtggggtgcctggaaactgctgaggaggtgaagaggaagctccagaaggacctggagggcctgagccagcggcacgaggagaaggtggccgcctacgacaagctggagaagaccaagacgcggctgcagcaggagctggacgacctgctggtggacctggaccaccagcgccagagcgcgtgcaacctggagaagaagcagaagaagtttgaccagctcctggcggaggagaagaccatctctgccaagtatgcagaggagcgcgaccgggctgaggcggaggcccgagagaaggagaccaaggctctgtcgctggcccgggccctggaggaagccatggagcagaaggcggagctggagcggctcaacaagcagttccgcacggagatggaggaccttatgagctccaaggatgatgtgggcaagagtgtccacgagctggagaagtccaagcgggccctagagcagcaggtggaggagatgaagacgcagctggaagagctggaggacgagctgcaggccaccgaagatgccaagctgcggttggaggtcaacctgcaggccatgaaggcccagttcgagcgggacctgcagggccgggacgagcagagcgaggagaagaagaagcagctggtcagacaggtgcgggagatggaggcagagctggaggacgagaggaagcagcgctcgatggcagtggccgcccggaagaagctggagatggacctgaaggacctggaggcgcacatcgactcggccaacaagaaccgggacgaagccatcaaacagctgcggaagctgcaggcccagatgaaggactgcatgcgcgagctggatgacacccgcgcctctcgtgaggagatcctggcccaggccaaagagaacgagaagaagctgaagagcatggaggccgagatgatccagttgcaggaggaactggcagccgcggagcgtgccaagcgccaggcccagcaggagcgggatgagctggctgacgagatcgccaacagcagcggcaaaggagccctggcgttagaggagaagcggcgtctggaggcccgcatcgcccagctggaggaggagctggaggaggagcagggcaacagccctgctcctccagggctccaacgagatcgagatccgcgccgagggcaacagccgcttcacctacagcgtcactgtcgatggctgcacgagtcacaccggagcctggggcaagacagtgattgaatacaaaaccaccaagacctcccgcctgcccatcatcgatgtggcccccttggacgttggtgccccagaccaggaattcggcttcgacgttggccctgtctgcttcctgtaaactccctccatcccaacctggctccctcccacccaaccaactttccccccaacccggaaacagacaagcaacccaaactgaaccccctcaaaagccaaaaaatgggagacaatttcacatggactttggaaaatatttttttcctttgcattcatctctcaaacttagtttttatctttgaccaaccgaacatgaccaaaaaccaaaagtgcattcaaccttaccaaaaaaaaaaaaaaaaaaagaataaataaataactttttaaaaaaggaagcttggtccacttgcttgaagacccatgcgggggtaagtccctttctgcccgttgggcttatgaaaccccaatgctgccctttctgctcctttctccacaccccccttggggcctcccctccactccttcccaaatctgtctccccagaagacacaggaaacaatgtattgtctgcccagcaatcaaaggcaatgctcaaacacccaagtggcccccaccctcagcccgctcctgcccgcccagcacccccaggccctgggggacctggggttctcagactgccaaagaagccttgccatctggcgctcccatggctcttgcaacatctccccttcgtttttgagggggtcatgccgggggagccaccagcccctcactgggttcggaggagagtcaggaagggccacgacaaagcagaaacatcggatttggggaacgcgtgtcaatcccttgtgccgcagggctgggcgggagagactgttctgttccttgtgtaactgtgttgctgaaagactacctcgttcttgtcttgatgtgtcaccggggcaactgcctgggggcggggatgggggcagggtggaagcggctccccattttataccaaaggtgctacatctatgtgatgggtggggtggggagggaatcactggtgctatagaaattgagatgcccccccaggccagcaaatgttcctttttgttcaaagtctatttttattccttgatatttttctttttttttttttttttttgtggatggggacttgtgaatttttctaaaggtgctatttaacatgggaggagagcgtgtgcggctccagcccagcccgctgctcactttccaccctctctccacctgcctctggcttctcaggcctctgctctccgacctctctcctctgaaaccctcctccacagctgcagcccatcctcccggctccctcctagtctgtcctgcgtcctctgtccccgggtttcagagacaacttcccaaagcacaaagcagtttttccccctaggggtgggaggaagcaaaagactctgtacctattttgtatgtgtataataatttgagatgtttttaattattttgattgctggaataaagcatgtggaaatgacccaaacataatcgtcggagcagacgggagtttctcctcggggtcggagcaggaggcacgcggagtgtgaggccacgcatgagcggacgctaaccccctccccagccacaaagagtctacatgtctagggtctagacatgttcagctttgtggacctccggctcctgctcctcttagcggccaccgccctcctgacgcacggccaagaggaaggccaagtcgagggccaagacgaagacatcccaccaatcacctgcgtacagaacggcctcaggtaccatgaccgagacgtgtggaaacccgagccctgccggatctgcgtctgcgacaacggcaaggtgttgtgcgatgacgtgatctgtgacgagaccaagaactgccccggcgccgaagtccccgagggcgagtgctgtcccgtctgccccgacggctcagagtcacccaccgaccaagaaaccaccggcgtcgagggacccaagggagacactggcccccgaggcccaaggggacccgcaggcccccctggccgagatggcatccctggacagcctggacttcccggaccccccggaccccccggacctcccggaccccctggcctcggaggaaactttgctccccagctgtcttatggctatgatgagaaatcaaccggaggaatttccgtgcctggccccatgggtccctctggtcctcgtggtctccctggcccccctggtgcacctggtccccaaggcttccaaggtccccctggtgagcctggcgagcctggagcttcaggtcccatgggtccccgaggtcccccaggtccccctggaaagaatggagatgatggggaagctggaaaacctggtcgtcctggtgagcgtgggcctcctgggcctcagggtgctcgaggattgcccggaacagctggcctccctggaatgaagggacacagaggtttcagtggtttggatggtgccaagggagatgctggtcctgctggtcctaagggtgagcctggcagccctggtgaaaatggagctcctggtcagatgggcccccgtggcctgcctggtgagagaggtcgccctggagcccctggccctgctggtgctcgtggaaatgatggtgctactggtgctgccgggccccctggtcccaccggccccgctggtcctcctggcttccctggtgctgttggtgctaagggtgaagctggtccccaagggccccgaggctctgaaggtccccagggtgtgcgtggtgagcctggcccccctggccctgctggtgctgctggccctgctggaaaccctggtgctgatggacagcctggtgctaaaggtgccaatggtgctcctggtattgctggtgctcctggcttccctggtgcccgaggcccctctggaccccagggccccggcggccctcctggtcccaagggtaacagcggtgaacctggtgctcctggcagcaaaggagacactggtgctaagggagagcctggccctgttggtgttcaaggaccccctggccctgctggagaggaaggaaagcgaggagctcgaggtgaacccggacccactggcctgcccggaccccctggcgagcgtggtggacctggtagccgtggtttccctggcgcagatggtgttgctggtcccaagggtcccgctggtgaacgtggttctcctggccctgctggccccaaaggatctcctggtgaagctggtcgtcccggtgaagctggtctgcctggtgccaagggtctgactggaagccctggcagccctggtcctgatggcaaaactggcccccctggtcccgccggtcaagatggtcgccccggacccccaggcccacctggtgcccgtggtcaggctggtgtgatgggattccctggacctaaaggtgctgctggagagcccggcaaggctggagagcgaggtgttcccggaccccctggcgctgtcggtcctgctggcaaagatggagaggctggagctcagggaccccctggccctgctggtcccgctggcgagagaggtgaacaaggccctgctggctcccccggattccagggtctccctggtcctgctggtcctccaggtgaagcaggcaaacctggtgaacagggtgttcctggagaccttggcgcccctggcccctctggagcaagaggcgagagaggtttccctggcgagcgtggtgtgcaaggtccccctggtcctgctggtccccgaggggccaacggtgctcccggcaacgatggtgctaagggtgatgctggtgcccctggagctcccggtagccagggcgcccctggccttcagggaatgcctggtgaacgtggtgcagctggtcttccagggcctaagggtgacagaggtgatgctggtcccaaaggtgctgatggctctcctggcaaagatggcgtccgtggtctgactggccccattggtcctcctggccctgctggtgcccctggtgacaagggtgaaagtggtcccagcggccctgctggtcccactggagctcgtggtgcccccggagaccgtggtgagcctggtccccccggccctgctggctttgctggcccccctggtgctgacggccaacctggtgctaaaggcgaacctggtgatgctggtgctaaaggcgatgctggtccccctggccctgccggacccgctggaccccctggccccattggtaatgttggtgctcctggagccaaaggtgctcgcggcagcgctggtccccctggtgctactggtttccctggtgctgctggccgagtcggtcctcctggcccctctggaaatgctggaccccctggccctcctggtcctgctggcaaagaaggcggcaaaggtccccgtggtgagactggccctgctggacgtcctggtgaagttggtccccctggtccccctggccctgctggcgagaaaggatcccctggtgctgatggtcctgctggtgctcctggtactcccgggcctcaaggtattgctggacagcgtggtgtggtcggcctgcctggtcagagaggagagagaggcttccctggtcttcctggcccctctggtgaacctggcaaacaaggtccctctggagcaagtggtgaacgtggtccccctggtcccatgggcccccctggattggctggaccccctggtgaatctggacgtgagggggctcctggtgccgaaggttcccctggacgagacggttctcctggcgccaagggtgaccgtggtgagaccggccccgctggaccccctggtgctcctggtgctcctggtgcccctggccccgttggccctgctggcaagagtggtgatcgtggtgagactggtcctgctggtcccaccggtcctgtcggccctgttggcgcccgtggccccgccggaccccaaggcccccgtggtgacaagggtgagacaggcgaacagggcgacagaggcataaagggtcaccgtggcttctctggcctccagggtccccctggccctcctggctctcctggtgaacaaggtccctctggagcctctggtcctgctggtccccgaggtccccctggctctgctggtgctcctggcaaagatggactcaacggtctccctggccccattgggccccctggtcctcgcggtcgcactggtgatgctggtcctgttggtccccccggccctcctggacctcctggtccccctggtcctcccagcgctggtttcgacttcagcttcctgccccagccacctcaagagaaggctcacgatggtggccgctactaccgggctgatgatgccaatgtggttcgtgaccgtgacctcgaggtggacaccaccctcaagagcctgagccagcagatcgagaacatccggagcccagagggcagccgcaagaaccccgcccgcacctgccgtgacctcaagatgtgccactctgactggaagagtggagagtactggattgaccccaaccaaggctgcaacctggatgccatcaaagtcttctgcaacatggagactggtgagacctgcgtgtaccccactcagcccagtgtggcccagaagaactggtacatcagcaagaaccccaaggacaagaggcatgtctggttcggcgagagcatgaccgatggattccagttcgagtatggcggccagggctccgaccctgccgatgtggccatccagctgaccttcctgcgcctgatgtccaccgaggcctcccagaacatcacctaccactgcaagaacagcgtggcctacatggaccagcagactggcaacctcaagaaggccctgctcctccagggctccaacgagatcgagatccgcgccgagggcaacagccgcttcacctacagcgtcactgtcgatggctgcacgagtcacaccggagcctggggcaagacagtgattgaatacaaaaccaccaagacctcccgcctgcccatcatcgatgtggcccccttggacgttggtgccccagaccaggaattcggcttcgacgttggccctgtctgcttcctgtaaactccctccatcccaacctggctccctcccacccaaccaactttccccccaacccggaaacagacaagcaacccaaactgaaccccctcaaaagccaaaaaatgggagacaatttcacatggactttggaaaatatttttttcctttgcattcatctctcaaacttagtttttatctttgaccaaccgaacatgaccaaaaaccaaaagtgcattcaaccttaccaaaaaaaaaaaaaaaaaaagaataaataaataactttttaaaaaaggaagcttggtccacttgcttgaagacccatgcgggggtaagtccctttctgcccgttgggcttatgaaaccccaatgctgccctttctgctcctttctccacaccccccttggggcctcccctccactccttcccaaatctgtctccccagaagacacaggaaacaatgtattgtctgcccagcaatcaaaggcaatgctcaaacacccaagtggcccccaccctcagcccgctcctgcccgcccagcacccccaggccctgggggacctggggttctcagactgccaaagaagccttgccatctggcgctcccatggctcttgcaacatctccccttcgtttttgagggggtcatgccgggggagccaccagcccctcactgggttcggaggagagtcaggaagggccacgacaaagcagaaacatcggatttggggaacgcgtgtcaatcccttgtgccgcagggctgggcgggagagactgttctgttccttgtgtaactgtgttgctgaaagactacctcgttcttgtcttgatgtgtcaccggggcaactgcctgggggcggggatgggggcagggtggaagcggctccccattttataccaaaggtgctacatctatgtgatgggtggggtggggagggaatcactggtgctatagaaattgagatgcccccccaggccagcaaatgttcctttttgttcaaagtctatttttattccttgatatttttctttttttttttttttttttgtggatggggacttgtgaatttttctaaaggtgctatttaacatgggaggagagcgtgtgcggctccagcccagcccgctgctcactttccaccctctctccacctgcctctggcttctcaggcctctgctctccgacctctctcctctgaaaccctcctccacagctgcagcccatcctcccggctccctcctagtctgtcctgcgtcctctgtccccgggtttcagagacaacttcccaaagcacaaagcagtttttccccctaggggtgggaggaagcaaaagactctgtacctattttgtatgtgtataataatttgagatgtttttaattattttgattgctggaataaagcatgtggaaatgacccaaacataatcgtcggagcagacgggagtttctcctcggggtcggagcaggaggcacgcggagtgtgaggccacgcatgagcggacgctaaccccctccccagccacaaagagtctacatgtctagggtctagacatgttcagctttgtggacctccggctcctgctcctcttagcggccaccgccctcctgacgcacggccaagaggaaggccaagtcgagggccaagacgaagacatcccaccaatcacctgcgtacagaacggcctcaggtaccatgaccgagacgtgtggaaacccgagccctgccggatctgcgtctgcgacaacggcaaggtgttgtgcgatgacgtgatctgtgacgagaccaagaactgccccggcgccgaagtccccgagggcgagtgctgtcccgtctgccccgacggctcagagtcacccaccgaccaagaaaccaccggcgtcgagggacccaagggagacactggcccccgaggcccaaggggacccgcaggcccccctggccgagatggcatccctggacagcctggacttcccggaccccccggaccccccggacctcccggaccccctggcctcggaggaaactttgctccccagctgtcttatggctatgatgagaaatcaaccggaggaatttccgtgcctggccccatgggtccctctggtcctcgtggtctccctggcccccctggtgcacctggtccccaaggcttccaaggtccccctggtgagcctggcgagcctggagcttcaggtcccatgggtccccgaggtcccccaggtccccctggaaagaatggagatgatggggaagctggaaaacctggtcgtcctggtgagcgtgggcctcctgggcctcagggtgctcgaggattgcccggaacagctggcctccctggaatgaagggacacagaggtttcagtggtttggatggtgccaagggagatgctggtcctgctggtcctaagggtgagcctggcagccctggtgaaaatggagctcctggtcagatgggcccccgtggcctgcctggtgagagaggtcgccctggagcccctggccctgctggtgctcgtggaaatgatggtgctactggtgctgccgggccccctggtcccaccggccccgctggtcctcctggcttccctggtgctgttggtgctaagggtgaagctggtccccaagggccccgaggctctgaaggtccccagggtgtgcgtggtgagcctggcccccctggccctgctggtgctgctggccctgctggaaaccctggtgctgatggacagcctggtgctaaaggtgccaatggtgctcctggtattgctggtgctcctggcttccctggtgcccgaggcccctctggaccccagggccccggcggccctcctggtcccaagggtaacagcggtgaacctggtgctcctggcagcaaaggagacactggtgctaagggagagcctggccctgttggtgttcaaggaccccctggccctgctggagaggaaggaaagcgaggagctcgaggtgaacccggacccactggcctgcccggaccccctggcgagcgtggtggacctggtagccgtggtttccctggcgcagatggtgttgctggtcccaagggtcccgctggtgaacgtggttctcctggccctgctggccccaaaggatctcctggtgaagctggtcgtcccggtgaagctggtctgcctggtgccaagggtctgactggaagccctggcagccctggtcctgatggcaaaactggcccccctggtcccgccggtcaagatggtcgccccggacccccaggcccacctggtgcccgtggtcaggctggtgtgatgggattccctggacctaaaggtgctgctggagagcccggcaaggctggagagcgaggtgttcccggaccccctggcgctgtcggtcctgctggcaaagatggagaggctggagctcagggaccccctggccctgctggtcccgctggcgagagaggtgaacaaggccctgctggctcccccggattccagggtctccctggtcctgctggtcctccaggtgaagcaggcaaacctggtgaacagggtgttcctggagaccttggcgcccctggcccctctggagcaagaggcgagagaggtttccctggcgagcgtggtgtgcaaggtccccctggtcctgctggtccccgaggggccaacggtgctcccggcaacgatggtgctaagggtgatgctggtgcccctggagctcccggtagccagggcgcccctggccttcagggaatgcctggtgaacgtggtgcagctggtcttccagggcctaagggtgacagaggtgatgctggtcccaaaggtgctgatggctctcctggcaaagatggcgtccgtggtctgactggccccattggtcctcctggccctgctggtgcccctggtgacaagggtgaaagtggtcccagcggccctgctggtcccactggagctcgtggtgcccccggagaccgtggtgagcctggtccccccggccctgctggctttgctggcccccctggtgctgacggccaacctggtgctaaaggcgaacctggtgatgctggtgctaaaggcgatgctggtccccctggccctgccggacccgctggaccccctggccccattggtaatgttggtgctcctggagccaaaggtgctcgcggcagcgctggtccccctggtgctactggtttccctggtgctgctggccgagtcggtcctcctggcccctctggaaatgctggaccccctggccctcctggtcctgctggcaaagaaggcggcaaaggtccccgtggtgagactggccctgctggacgtcctggtgaagttggtccccctggtccccctggccctgctggcgagaaaggatcccctggtgctgatggtcctgctggtgctcctggtactcccgggcctcaaggtattgctggacagcgtggtgtggtcggcctgcctggtcagagaggagagagaggcttccctggtcttcctggcccctctggtgaacctggcaaacaaggtccctctggagcaagtggtgaacgtggtccccctggtcccatgggcccccctggattggctggaccccctggtgaatctggacgtgagggggctcctggtgccgaaggttcccctggacgagacggttctcctggcgccaagggtgaccgtggtgagaccggccccgctggaccccctggtgctcctggtgctcctggtgcccctggccccgttggccctgctggcaagagtggtgatcgtggtgagactggtcctgctggtcccaccggtcctgtcggccctgttggcgcccgtggccccgccggaccccaaggcccccgtggtgacaagggtgagacaggcgaacagggcgacagaggcataaagggtcaccgtggcttctctggcctccagggtccccctggccctcctggctctcctggtgaacaaggtccctctggagcctctggtcctgctggtccccgaggtccccctggctctgctggtgctcctggcaaagatggactcaacggtctccctggccccattgggccccctggtcctcgcggtcgcactggtgatgctggtcctgttggtccccccggccctcctggacctcctggtccccctggtcctcccagcgctggtttcgacttcagcttcctgccccagccacctcaagagaaggctcacgatggtggccgctactaccgggctgatgatgccaatgtggttcgtgaccgtgacctcgaggtggacaccaccctcaagagcctgagccagcagatcgagaacatccggagcccagagggcagccgcaagaaccccgcccgcacctgccgtgacctcaagatgtgccactctgactggaagagtggagagtactggattgaccccaaccaaggctgcaacctggatgccatcaaagtcttctgcaacatggagactggtgagacctgcgtgtaccccactcagcccagtgtggcccagaagaactggtacatcagcaagaaccccaaggacaagaggcatgtctggttcggcgagagcatgaccgatggattccagttcgagtatggcggccagggctccgaccctgccgatgtggccatccagctgaccttcctgcgcctgatgtccaccgaggcctcccagaacatcacctaccactgcaagaacagcgtggcctacatggaccagcagactggcaacctcaagaaggccctgctcctccagggctccaacgagatcgagatccgcgccgagggcaacagccgcttcacctacagcgtcactgtcgatggctgcacgagtcacaccggagcctggggcaagacagtgattgaatacaaaaccaccaagacctcccgcctgcccatcatcgatgtggcccccttggacgttggtgccccagaccaggaattcggcttcgacgttggccctgtctgcttcctgtaaactccctccatcccaacctggctccctcccacccaaccaactttccccccaacccggaaacagacaagcaacccaaactgaaccccctcaaaagccaaaaaatgggagacaatttcacatggactttggaaaatatttttttcctttgcattcatctctcaaacttagtttttatctttgaccaaccgaacatgaccaaaaaccaaaagtgcattcaaccttaccaaaaaaaaaaaaaaaaaaagaataaataaataactttttaaaaaaggaagcttggtccacttgcttgaagacccatgcgggggtaagtccctttctgcccgttgggcttatgaaaccccaatgctgccctttctgctcctttctccacaccccccttggggcctcccctccactccttcccaaatctgtctccccagaagacacaggaaacaatgtattgtctgcccagcaatcaaaggcaatgctcaaacacccaagtggcccccaccctcagcccgctcctgcccgcccagcacccccaggccctgggggacctggggttctcagactgccaaagaagccttgccatctggcgctcccatggctcttgcaacatctccccttcgtttttgagggggtcatgccgggggagccaccagcccctcactgggttcggaggagagtcaggaagggccacgacaaagcagaaacatcggatttggggaacgcgtgtcaatcccttgtgccgcagggctgggcgggagagactgttctgttccttgtgtaactgtgttgctgaaagactacctcgttcttgtcttgatgtgtcaccggggcaactgcctgggggcggggatgggggcagggtggaagcggctccccattttataccaaaggtgctacatctatgtgatgggtggggtggggagggaatcactggtgctatagaaattgagatgcccccccaggccagcaaatgttcctttttgttcaaagtctatttttattccttgatatttttctttttttttttttttttttgtggatggggacttgtgaatttttctaaaggtgctatttaacatgggaggagagcgtgtgcggctccagcccagcccgctgctcactttccaccctctctccacctgcctctggcttctcaggcctctgctctccgacctctctcctctgaaaccctcctccacagctgcagcccatcctcccggctccctcctagtctgtcctgcgtcctctgtccccgggtttcagagacaacttcccaaagcacaaagcagtttttccccctaggggtgggaggaagcaaaagactctgtacctattttgtatgtgtataataatttgagatgtttttaattattttgattgctggaataaagcatgtggaaatgacccaaacataatcgtcggagcagacgggagtttctcctcggggtcggagcaggaggcacgcggagtgtgaggccacgcatgagcggacgctaaccccctccccagccacaaagagtctacatgtctagggtctagacatgttcagctttgtggacctccggctcctgctcctcttagcggccaccgccctcctgacgcacggccaagaggaaggccaagtcgagggccaagacgaagacatcccaccaatcacctgcgtacagaacggcctcaggtaccatgaccgagacgtgtggaaacccgagccctgccggatctgcgtctgcgacaacggcaaggtgttgtgcgatgacgtgatctgtgacgagaccaagaactgccccggcgccgaagtccccgagggcgagtgctgtcccgtctgccccgacggctcagagtcacccaccgaccaagaaaccaccggcgtcgagggacccaagggagacactggcccccgaggcccaaggggacccgcaggcccccctggccgagatggcatccctggacagcctggacttcccggaccccccggaccccccggacctcccggaccccctggcctcggaggaaactttgctccccagctgtcttatggctatgatgagaaatcaaccggaggaatttccgtgcctggccccatgggtccctctggtcctcgtggtctccctggcccccctggtgcacctggtccccaaggcttccaaggtccccctggtgagcctggcgagcctggagcttcaggtcccatgggtccccgaggtcccccaggtccccctggaaagaatggagatgatggggaagctggaaaacctggtcgtcctggtgagcgtgggcctcctgggcctcagggtgctcgaggattgcccggaacagctggcctccctggaatgaagggacacagaggtttcagtggtttggatggtgccaagggagatgctggtcctgctggtcctaagggtgagcctggcagccctggtgaaaatggagctcctggtcagatgggcccccgtggcctgcctggtgagagaggtcgccctggagcccctggccctgctggtgctcgtggaaatgatggtgctactggtgctgccgggccccctggtcccaccggccccgctggtcctcctggcttccctggtgctgttggtgctaagggtgaagctggtccccaagggccccgaggctctgaaggtccccagggtgtgcgtggtgagcctggcccccctggccctgctggtgctgctggccctgctggaaaccctggtgctgatggacagcctggtgctaaaggtgccaatggtgctcctggtattgctggtgctcctggcttccctggtgcccgaggcccctctggaccccagggccccggcggccctcctggtcccaagggtaacagcggtgaacctggtgctcctggcagcaaaggagacactggtgctaagggagagcctggccctgttggtgttcaaggaccccctggccctgctggagaggaaggaaagcgaggagctcgaggtgaacccggacccactggcctgcccggaccccctggcgagcgtggtggacctggtagccgtggtttccctggcgcagatggtgttgctggtcccaagggtcccgctggtgaacgtggttctcctggccctgctggccccaaaggatctcctggtgaagctggtcgtcccggtgaagctggtctgcctggtgccaagggtctgactggaagccctggcagccctggtcctgatggcaaaactggcccccctggtcccgccggtcaagatggtcgccccggacccccaggcccacctggtgcccgtggtcaggctggtgtgatgggattccctggacctaaaggtgctgctggagagcccggcaaggctggagagcgaggtgttcccggaccccctggcgctgtcggtcctgctggcaaagatggagaggctggagctcagggaccccctggccctgctggtcccgctggcgagagaggtgaacaaggccctgctggctcccccggattccagggtctccctggtcctgctggtcctccaggtgaagcaggcaaacctggtgaacagggtgttcctggagaccttggcgcccctggcccctctggagcaagaggcgagagaggtttccctggcgagcgtggtgtgcaaggtccccctggtcctgctggtccccgaggggccaacggtgctcccggcaacgatggtgctaagggtgatgctggtgcccctggagctcccggtagccagggcgcccctggccttcagggaatgcctggtgaacgtggtgcagctggtcttccagggcctaagggtgacagaggtgatgctggtcccaaaggtgctgatggctctcctggcaaagatggcgtccgtggtctgactggccccattggtcctcctggccctgctggtgcccctggtgacaagggtgaaagtggtcccagcggccctgctggtcccactggagctcgtggtgcccccggagaccgtggtgagcctggtccccccggccctgctggctttgctggcccccctggtgctgacggccaacctggtgctaaaggcgaacctggtgatgctggtgctaaaggcgatgctggtccccctggccctgccggacccgctggaccccctggccccattggtaatgttggtgctcctggagccaaaggtgctcgcggcagcgctggtccccctggtgctactggtttccctggtgctgctggccgagtcggtcctcctggcccctctggaaatgctggaccccctggccctcctggtcctgctggcaaagaaggcggcaaaggtccccgtggtgagactggccctgctggacgtcctggtgaagttggtccccctggtccccctggccctgctggcgagaaaggatcccctggtgctgatggtcctgctggtgctcctggtactcccgggcctcaaggtattgctggacagcgtggtgtggtcggcctgcctggtcagagaggagagagaggcttccctggtcttcctggcccctctggtgaacctggcaaacaaggtccctctggagcaagtggtgaacgtggtccccctggtcccatgggcccccctggattggctggaccccctggtgaatctggacgtgagggggctcctggtgccgaaggttcccctggacgagacggttctcctggcgccaagggtgaccgtggtgagaccggccccgctggaccccctggtgctcctggtgctcctggtgcccctggccccgttggccctgctggcaagagtggtgatcgtggtgagactggtcctgctggtcccaccggtcctgtcggccctgttggcgcccgtggccccgccggaccccaaggcccccgtggtgacaagggtgagacaggcgaacagggcgacagaggcataaagggtcaccgtggcttctctggcctccagggtccccctggccctcctggctctcctggtgaacaaggtccctctggagcctctggtcctgctggtccccgaggtccccctggctctgctggtgctcctggcaaagatggactcaacggtctccctggccccattgggccccctggtcctcgcggtcgcactggtgatgctggtcctgttggtccccccggccctcctggacctcctggtccccctggtcctcccagcgctggtttcgacttcagcttcctgccccagccacctcaagagaaggctcacgatggtggccgctactaccgggctgatgatgccaatgtggttcgtgaccgtgacctcgaggtggacaccaccctcaagagcctgagccagcagatcgagaacatccggagcccagagggcagccgcaagaaccccgcccgcacctgccgtgacctcaagatgtgccactctgactggaagagtggagagtactggattgaccccaaccaaggctgcaacctggatgccatcaaagtcttctgcaacatggagactggtgagacctgcgtgtaccccactcagcccagtgtggcccagaagaactggtacatcagcaagaaccccaaggacaagaggcatgtctggttcggcgagagcatgaccgatggattccagttcgagtatggcggccagggctccgaccctgccgatgtggccatccagctgaccttcctgcgcctgatgtccaccgaggcctcccagaacatcacctaccactgcaagaacagcgtggcctacatggaccagcagactggcaacctcaagaaggccctgctcctccagggctccaacgagatcgagatccgcgccgagggcaacagccgcttcacctacagcgtcactgtcgatggctgcacgagtcacaccggagcctggggcaagacagtgattgaatacaaaaccaccaagacctcccgcctgcccatcatcgatgtggcccccttggacgttggtgccccagaccaggaattcggcttcgacgttggccctgtctgcttcctgtaaactccctccatcccaacctggctccctcccacccaaccaactttccccccaacccggaaacagacaagcaacccaaactgaaccccctcaaaagccaaaaaatgggagacaatttcacatggactttggaaaatatttttttcctttgcattcatctctcaaacttagtttttatctttgaccaaccgaacatgaccaaaaaccaaaagtgcattcaaccttaccaaaaaaaaaaaaaaaaaaagaataaataaataactttttaaaaaaggaagcttggtccacttgcttgaagacccatgcgggggtaagtccctttctgcccgttgggcttatgaaaccccaatgctgccctttctgctcctttctccacaccccccttggggcctcccctccactccttcccaaatctgtctccccagaagacacaggaaacaatgtattgtctgcccagcaatcaaaggcaatgctcaaacacccaagtggcccccaccctcagcccgctcctgcccgcccagcacccccaggccctgggggacctggggttctcagactgccaaagaagccttgccatctggcgctcccatggctcttgcaacatctccccttcgtttttgagggggtcatgccgggggagccaccagcccctcactgggttcggaggagagtcaggaagggccacgacaaagcagaaacatcggatttggggaacgcgtgtcaatcccttgtgccgcagggctgggcgggagagactgttctgttccttgtgtaactgtgttgctgaaagactacctcgttcttgtcttgatgtgtcaccggggcaactgcctgggggcggggatgggggcagggtggaagcggctccccattttataccaaaggtgctacatctatgtgatgggtggggtggggagggaatcactggtgctatagaaattgagatgcccccccaggccagcaaatgttcctttttgttcaaagtctatttttattccttgatatttttctttttttttttttttttttgtggatggggacttgtgaatttttctaaaggtgctatttaacatgggaggagagcgtgtgcggctccagcccagcccgctgctcactttccaccctctctccacctgcctctggcttctcaggcctctgctctccgacctctctcctctgaaaccctcctccacagctgcagcccatcctcccggctccctcctagtctgtcctgcgtcctctgtccccgggtttcagagacaacttcccaaagcacaaagcagtttttccccctaggggtgggaggaagcaaaagactctgtacctattttgtatgtgtataataatttgagatgtttttaattattttgattgctggaataaagcatgtggaaatgacccaaacataatcgtcggagcagacgggagtttctcctcggggtcggagcaggaggcacgcggagtgtgaggccacgcatgagcggacgctaaccccctccccagccacaaagagtctacatgtctagggtctagacatgttcagctttgtggacctccggctcctgctcctcttagcggccaccgccctcctgacgcacggccaagaggaaggccaagtcgagggccaagacgaagacatcccaccaatcacctgcgtacagaacggcctcaggtaccatgaccgagacgtgtggaaacccgagccctgccggatctgcgtctgcgacaacggcaaggtgttgtgcgatgacgtgatctgtgacgagaccaagaactgccccggcgccgaagtccccgagggcgagtgctgtcccgtctgccccgacggctcagagtcacccaccgaccaagaaaccaccggcgtcgagggacccaagggagacactggcccccgaggcccaaggggacccgcaggcccccctggccgagatggcatccctggacagcctggacttcccggaccccccggaccccccggacctcccggaccccctggcctcggaggaaactttgctccccagctgtcttatggctatgatgagaaatcaaccggaggaatttccgtgcctggccccatgggtccctctggtcctcgtggtctccctggcccccctggtgcacctggtccccaaggcttccaaggtccccctggtgagcctggcgagcctggagcttcaggtcccatgggtccccgaggtcccccaggtccccctggaaagaatggagatgatggggaagctggaaaacctggtcgtcctggtgagcgtgggcctcctgggcctcagggtgctcgaggattgcccggaacagctggcctccctggaatgaagggacacagaggtttcagtggtttggatggtgccaagggagatgctggtcctgctggtcctaagggtgagcctggcagccctggtgaaaatggagctcctggtcagatgggcccccgtggcctgcctggtgagagaggtcgccctggagcccctggccctgctggtgctcgtggaaatgatggtgctactggtgctgccgggccccctggtcccaccggccccgctggtcctcctggcttccctggtgctgttggtgctaagggtgaagctggtccccaagggccccgaggctctgaaggtccccagggtgtgcgtggtgagcctggcccccctggccctgctggtgctgctggccctgctggaaaccctggtgctgatggacagcctggtgctaaaggtgccaatggtgctcctggtattgctggtgctcctggcttccctggtgcccgaggcccctctggaccccagggccccggcggccctcctggtcccaagggtaacagcggtgaacctggtgctcctggcagcaaaggagacactggtgctaagggagagcctggccctgttggtgttcaaggaccccctggccctgctggagaggaaggaaagcgaggagctcgaggtgaacccggacccactggcctgcccggaccccctggcgagcgtggtggacctggtagccgtggtttccctggcgcagatggtgttgctggtcccaagggtcccgctggtgaacgtggttctcctggccctgctggccccaaaggatctcctggtgaagctggtcgtcccggtgaagctggtctgcctggtgccaagggtctgactggaagccctggcagccctggtcctgatggcaaaactggcccccctggtcccgccggtcaagatggtcgccccggacccccaggcccacctggtgcccgtggtcaggctggtgtgatgggattccctggacctaaaggtgctgctggagagcccggcaaggctggagagcgaggtgttcccggaccccctggcgctgtcggtcctgctggcaaagatggagaggctggagctcagggaccccctggccctgctggtcccgctggcgagagaggtgaacaaggccctgctggctcccccggattccagggtctccctggtcctgctggtcctccaggtgaagcaggcaaacctggtgaacagggtgttcctggagaccttggcgcccctggcccctctggagcaagaggcgagagaggtttccctggcgagcgtggtgtgcaaggtccccctggtcctgctggtccccgaggggccaacggtgctcccggcaacgatggtgctaagggtgatgctggtgcccctggagctcccggtagccagggcgcccctggccttcagggaatgcctggtgaacgtggtgcagctggtcttccagggcctaagggtgacagaggtgatgctggtcccaaaggtgctgatggctctcctggcaaagatggcgtccgtggtctgactggccccattggtcctcctggccctgctggtgcccctggtgacaagggtgaaagtggtcccagcggccctgctggtcccactggagctcgtggtgcccccggagaccgtggtgagcctggtccccccggccctgctggctttgctggcccccctggtgctgacggccaacctggtgctaaaggcgaacctggtgatgctggtgctaaaggcgatgctggtccccctggccctgccggacccgctggaccccctggccccattggtaatgttggtgctcctggagccaaaggtgctcgcggcagcgctggtccccctggtgctactggtttccctggtgctgctggccgagtcggtcctcctggcccctctggaaatgctggaccccctggccctcctggtcctgctggcaaagaaggcggcaaaggtccccgtggtgagactggccctgctggacgtcctggtgaagttggtccccctggtccccctggccctgctggcgagaaaggatcccctggtgctgatggtcctgctggtgctcctggtactcccgggcctcaaggtattgctggacagcgtggtgtggtcggcctgcctggtcagagaggagagagaggcttccctggtcttcctggcccctctggtgaacctggcaaacaaggtccctctggagcaagtggtgaacgtggtccccctggtcccatgggcccccctggattggctggaccccctggtgaatctggacgtgagggggctcctggtgccgaaggttcccctggacgagacggttctcctggcgccaagggtgaccgtggtgagaccggccccgctggaccccctggtgctcctggtgctcctggtgcccctggccccgttggccctgctggcaagagtggtgatcgtggtgagactggtcctgctggtcccaccggtcctgtcggccctgttggcgcccgtggccccgccggaccccaaggcccccgtggtgacaagggtgagacaggcgaacagggcgacagaggcataaagggtcaccgtggcttctctggcctccagggtccccctggccctcctggctctcctggtgaacaaggtccctctggagcctctggtcctgctggtccccgaggtccccctggctctgctggtgctcctggcaaagatggactcaacggtctccctggccccattgggccccctggtcctcgcggtcgcactggtgatgctggtcctgttggtccccccggccctcctggacctcctggtccccctggtcctcccagcgctggtttcgacttcagcttcctgccccagccacctcaagagaaggctcacgatggtggccgctactaccgggctgatgatgccaatgtggttcgtgaccgtgacctcgaggtggacaccaccctcaagagcctgagccagcagatcgagaacatccggagcccagagggcagccgcaagaaccccgcccgcacctgccgtgacctcaagatgtgccactctgactggaagagtggagagtactggattgaccccaaccaaggctgcaacctggatgccatcaaagtcttctgcaacatggagactggtgagacctgcgtgtaccccactcagcccagtgtggcccagaagaactggtacatcagcaagaaccccaaggacaagaggcatgtctggttcggcgagagcatgaccgatggattccagttcgagtatggcggccagggctccgaccctgccgatgtggccatccagctgaccttcctgcgcctgatgtccaccgaggcctcccagaacatcacctaccactgcaagaacagcgtggcctacatggaccagcagactggcaacctcaagaaggccctgctcctccagggctccaacgagatcgagatccgcgccgagggcaacagccgcttcacctacagcgtcactgtcgatggctgcacgagtcacaccggagcctggggcaagacagtgattgaatacaaaaccaccaagacctcccgcctgcccatcatcgatgtggcccccttggacgttggtgccccagaccaggaattcggcttcgacgttggccctgtctgcttcctgtaaactccctccatcccaacctggctccctcccacccaaccaactttccccccaacccggaaacagacaagcaacccaaactgaaccccctcaaaagccaaaaaatgggagacaatttcacatggactttggaaaatatttttttcctttgcattcatctctcaaacttagtttttatctttgaccaaccgaacatgaccaaaaaccaaaagtgcattcaaccttaccaaaaaaaaaaaaaaaaaaagaataaataaataactttttaaaaaaggaagcttggtccacttgcttgaagacccatgcgggggtaagtccctttctgcccgttgggcttatgaaaccccaatgctgccctttctgctcctttctccacaccccccttggggcctcccctccactccttcccaaatctgtctccccagaagacacaggaaacaatgtattgtctgcccagcaatcaaaggcaatgctcaaacacccaagtggcccccaccctcagcccgctcctgcccgcccagcacccccaggccctgggggacctggggttctcagactgccaaagaagccttgccatctggcgctcccatggctcttgcaacatctccccttcgtttttgagggggtcatgccgggggagccaccagcccctcactgggttcggaggagagtcaggaagggccacgacaaagcagaaacatcggatttggggaacgcgtgtcaatcccttgtgccgcagggctgggcgggagagactgttctgttccttgtgtaactgtgttgctgaaagactacctcgttcttgtcttgatgtgtcaccggggcaactgcctgggggcggggatgggggcagggtggaagcggctccccattttataccaaaggtgctacatctatgtgatgggtggggtggggagggaatcactggtgctatagaaattgagatgcccccccaggccagcaaatgttcctttttgttcaaagtctatttttattccttgatatttttctttttttttttttttttttgtggatggggacttgtgaatttttctaaaggtgctatttaacatgggaggagagcgtgtgcggctccagcccagcccgctgctcactttccaccctctctccacctgcctctggcttctcaggcctctgctctccgacctctctcctctgaaaccctcctccacagctgcagcccatcctcccggctccctcctagtctgtcctgcgtcctctgtccccgggtttcagagacaacttcccaaagcacaaagcagtttttccccctaggggtgggaggaagcaaaagactctgtacctattttgtatgtgtataataatttgagatgtttttaattattttgattgctggaataaagcatgtggaaatgacccaaacataatcgtcggagcagacgggagtttctcctcggggtcggagcaggaggcacgcggagtgtgaggccacgcatgagcggacgctaaccccctccccagccacaaagagtctacatgtctagggtctagacatgttcagctttgtggacctccggctcctgctcctcttagcggccaccgccctcctgacgcacggccaagaggaaggccaagtcgagggccaagacgaagacatcccaccaatcacctgcgtacagaacggcctcaggtaccatgaccgagacgtgtggaaacccgagccctgccggatctgcgtctgcgacaacggcaaggtgttgtgcgatgacgtgatctgtgacgagaccaagaactgccccggcgccgaagtccccgagggcgagtgctgtcccgtctgccccgacggctcagagtcacccaccgaccaagaaaccaccggcgtcgagggacccaagggagacactggcccccgaggcccaaggggacccgcaggcccccctggccgagatggcatccctggacagcctggacttcccggaccccccggaccccccggacctcccggaccccctggcctcggaggaaactttgctccccagctgtcttatggctatgatgagaaatcaaccggaggaatttccgtgcctggccccatgggtccctctggtcctcgtggtctccctggcccccctggtgcacctggtccccaaggcttccaaggtccccctggtgagcctggcgagcctggagcttcaggtcccatgggtccccgaggtcccccaggtccccctggaaagaatggagatgatggggaagctggaaaacctggtcgtcctggtgagcgtgggcctcctgggcctcagggtgctcgaggattgcccggaacagctggcctccctggaatgaagggacacagaggtttcagtggtttggatggtgccaagggagatgctggtcctgctggtcctaagggtgagcctggcagccctggtgaaaatggagctcctggtcagatgggcccccgtggcctgcctggtgagagaggtcgccctggagcccctggccctgctggtgctcgtggaaatgatggtgctactggtgctgccgggccccctggtcccaccggccccgctggtcctcctggcttccctggtgctgttggtgctaagggtgaagctggtccccaagggccccgaggctctgaaggtccccagggtgtgcgtggtgagcctggcccccctggccctgctggtgctgctggccctgctggaaaccctggtgctgatggacagcctggtgctaaaggtgccaatggtgctcctggtattgctggtgctcctggcttccctggtgcccgaggcccctctggaccccagggccccggcggccctcctggtcccaagggtaacagcggtgaacctggtgctcctggcagcaaaggagacactggtgctaagggagagcctggccctgttggtgttcaaggaccccctggccctgctggagaggaaggaaagcgaggagctcgaggtgaacccggacccactggcctgcccggaccccctggcgagcgtggtggacctggtagccgtggtttccctggcgcagatggtgttgctggtcccaagggtcccgctggtgaacgtggttctcctggccctgctggccccaaaggatctcctggtgaagctggtcgtcccggtgaagctggtctgcctggtgccaagggtctgactggaagccctggcagccctggtcctgatggcaaaactggcccccctggtcccgccggtcaagatggtcgccccggacccccaggcccacctggtgcccgtggtcaggctggtgtgatgggattccctggacctaaaggtgctgctggagagcccggcaaggctggagagcgaggtgttcccggaccccctggcgctgtcggtcctgctggcaaagatggagaggctggagctcagggaccccctggccctgctggtcccgctggcgagagaggtgaacaaggccctgctggctcccccggattccagggtctccctggtcctgctggtcctccaggtgaagcaggcaaacctggtgaacagggtgttcctggagaccttggcgcccctggcccctctggagcaagaggcgagagaggtttccctggcgagcgt

SEQ ID NO: 1083 - protein, 213 aa, Homo sapiens
MAGGHCGSFPAAAAGSGEIVQLNVGGTRFSTSRQTLMWIPDSFFSSLLSGRISTLRDETGAIFIDRDPAAFAPILNFLRTKELDLRGVSINVLRHEAEFYGITPLVRRLLLCEELERSSCGSVLFHGYLPPPGIPSRKINNTVRSADSRNGLNSTEGEARGNGTQPVLSGTGEETVRLGFPVDPRKVLIVAGHHNWIVAAYAHFAVCYSKRRF

SEQ ID NO: 1084 - protein, 213 aa, Homo sapiens; identical to SEQ ID NO: 1083

SEQ ID NO: 1085 - protein, 1387 aa, Homo sapiens
MAGPRPSPWARLLLAALISVSLSGTLANRCKKAPVKSCTECVRVDKDCAYCTDEMFRDRRCNTQAELLAAGCQRESIVVMESSFQITEETQIDTTLRRSQMSPQGLRVRLRPGEERHFELEVFEPLESPVDLYILMDFSNSMSDDLDNLKKMGQNLARVLSQLTSDYTIGFGKFVDKVSVPQTDMRPEKLKEPWPNSDPPFSFKNVISLTEDVDEFRNKLQGERISGNLDAPEGGFDAILQTAVCTRDIGWRPDSTHLLVFSTESAFHYEADGANVLAGIMSRNDERCHLDTTGTYTQYRTQDYPSVPTLVRLLAKHNIIPIFAVTNYSYSYYEKLHTYFPVSSLGVLQEDSSNIVELLEEAFNRIRSNLDIRALDSPRGLRTEVTSKMFQKTRTGSFHIRRGEVGIYQVQLRALEHVDGTHVCQLPEDQKGNIHLKPSFSDGLKMDAGIICDVCTCELQKEVRSARCSFNGDFVCGQCVCSEGWSGQTCNCSTGSLSDIQPCLREGEDKPCSGRGECQCGHCVCYGEGRYEGQFCEYDNFQCPRTSGFLCNDRGRCSMGQCVCEPGWTGPSCDCPLSNATCIDSNGGICNGRGHCECGRCHCHQQSLYTDTICEINYSAIHPGLCEDLRSCVQCQAWGTGEKKGRTCEECNFKVKMVDELKRAEEVVVRCSFRDEDDDCTYSYTMEGDGAPGPNSTVLVHKKKDCPPGSFWWLIPLLLLLLPLLALLLLLCWKYCACCKACLALLPCCNRGHMVGFKEDHYMLRENLMASDHLDTPMLRSGNLKGRDVVRWKVTNNMQRPGFATHAASINPTELVPYGLSLRLARLCTENLLKPDTRECAQLRQEVEENLNEVYRQISGVHKLQQTKFRQQPNAGKKQDHTIVDTVLMAPRSAKPALLKLTEKQVEQRAFHDLKVAPGYYTLTADQDARGMVEFQEGVELVDVRVPLFIRPEDDDEKQLLVEAIDVPAGTATLGRRLVNITIIKEQARDVVSFEQPEFSVSRGDQVARIPVIRRVLDGGKSQVSYRTQDGTAQGNRDYIPVEGELLFQPGEAWKELQVKLLELQEVDSLLRGRQVRRFHVQLSNPKFGAHLGQPHSTTIIIRDPDELDRSFTSQMLSSQPPPHGDLGAPQNPNAKAAGSRKIHFNWLPPSGKPMGYRVKYWIQGDSESEAHLLDSKVPSVELTNLYPYCDYEMKVCAYGAQGEGPYSSLVSCRTHQEVPSEPGRLAFNVVSSTVTQLSWAEPAETNGEITAYEVCYGLVNDDNRPIGPMKKVLVDNPKNRMLLIENLRESQPYRYTVKARNGAGWGPEREAIINLATQPKRPMSIPIIPDIPIVDAQSGEDYDSFLMYSDDVLRSPSGSQRPSVSDDTGCGWKFEPLLGWTWLAGT

SEQ ID NO: 1086 - protein, 1387 aa, Homo sapiens; identical to SEQ ID NO: 1085

SEQ ID NO: 1087 - protein, 209 aa, Homo sapiens
MAASWRLGCDPRLLRYLVGFPGRRSVGLVKGALGWSVSRGANWRWFHSTQWLRGDPIKILMPSLSPTMEEGNIVKWLKKEGGAPNYYPNSFGAPEQQPSALEHSIQYSGEVRRFNTANDDNVTQVRAFYVNVLNEEQRKRLCENIAGHLKDAQIFIQKKAVKNFTEVHPDYGSHIQALLDKYNAEKPKNAIHTFVQSGSHLAAREKANL

SEQ ID NO: 1088 - protein, 194 aa, Homo sapiens
MQSGGAEGSPGAGRTGRGPGSGKAPPAEISSGAPDFPGGDPIKILMPSLSPTMEEGNIVKWLKKEGGAPNYYPNSFGAPEQQPSALEHSIQYSGEVRRFNTANDDNVTQVRAFYVNVLNEEQRKRLCENIAGHLKDAQIFIQKKAVKNFTEVHPDYGSHIQALLDKYNAEKPKNAIHTFVQSGSHLAAREKANL

SEQ ID NO: 1089 - protein, 209 aa, Homo sapiens; identical to SEQ ID NO: 1087

SEQ ID NO: 1090 - protein, 654 aa, Homo sapiens
MSTSSLRRQMKNIVHNYSEAEIKVREATSNDPWGPSSSLMSEIADLTYNVVAFSEIMSMIWKRLNDHGKNWRHVYKAMTLMEYLIKTGSERVSQQCKENMYAVQTLKDFQYVDRDGKDQGVNVREKAKQLVALLRDEDRLREERAHALKTKEKLAQTATASSAAVGSGPPPEAEQAWPQSSGEEELQLQLALAMSKEEADQEERIRRGDDLRLQMAIEESKRETGGKEESSLMDLADVFTAPAPAPTTDPWGGPAPMAAAVPTAAPTSDPWGGPPVPPAADPWGGPAPTPASGDPWRPAAPAGPSVDPWGGTPAPAAGEGPTPDPWGSSDGGVPVSGPSASDPWTPAPAFSDPWGGSPAKPSTNGTTAGGFDTEPDEFSDFDRLRTALPTSGSSAGELELLAGEVPARSPGAFDMSGVRGSLAEAVGSPPPAATPTPTPPTRKTPESFLGPNAALVDLDSLVSRPGPTPPGAKASNPFLPGGGPATGPSVTNPFQPAPPATLTLNQLRLSPVPPVPGAPPTYISPLGGGPGLPPMMPPLLALLVNKVPLEPLVLLVPEVPLALLVLLAKMDSTVSLAPLGPLVLAVALVMLVLLVPPALLDLLVPLVLPALVSTSASCPSHLKRRLTMVAATTGLMMPMWFVTVTSRWTPPSRA

SEQ ID NO: 1091 - protein, 680 aa, Homo sapiens
MSTSSLRRQMKNIVHNYSEAEIKVREATSNDPWGPSSSLMSEIADLTYNVVAFSEIMSMIWKRLNDHGKNWRHVYKAMTLMEYLIKTGSERVSQQCKENMYAVQTLKDFQYVDRDGKDQGVNVREKAKQLVALLRDEDRLREERAHALKTKEKLAQTATASSAAVGSGPPPEAEQAWPQSSGEEELQLQLALAMSKEEADQPPSCGPEDDAQLQLALSLSREEHDKEERIRRGDDLRLQMAIEESKRETGGKEESSLMDLADVFTAPAPAPTTDPWGGPAPMAAAVPTAAPTSDPWGGPPVPPAADPWGGPAPTPASGDPWRPAAPAGPSVDPWGGTPAPAAGEGPTPDPWGSSDGGVPVSGPSASDPWTPAPAFSDPWGGSPAKPSTNGTTAAGGFDTEPDEFSDFDRLRTALPTSGSSAGELELLAGEVPARSPGAFDMSGVRGSLAEAVGSPPPAATPTPTPPTRKTPESFLGPNAALVDLDSLVSRPGPTPPGAKASNPFLPGGGPATGPSVTNPFQPAPPATLTLNQLRLSPVPPVPGAPPTYISPLGGGPGLPPMMPPLLALLVNKVPLEPLVLLVPEVPLALLVLLAKMDSTVSLAPLGPLVLAVALVMLVLLVPPALLDLLVPLVLPALVSTSASCPSHLKRRLTMVAATTGLMMPMWFVTVTSRWTPPSRA

SEQ ID NO: 1092 - protein, 766 aa, Homo sapiens
MGDQSWLWNQAAPGVRSPVFACSVEKGNVPLVLSEHLAHSRDPGSGAVRFLISPEPWASAILGTSGLLASPVLPAALDAVTCQHLPQPSSGSRPISPRIGALCPLLLQPGTMSTSSLRRQMKNIVHNYSEAEIKVREATSNDPWGPSSSLMSEIADLTYNVVAFSEIMSMIWKRLNDHGKNWRHVYKAMTLMEYLIKTGSERVSQQCKENMYAVQTLKDFQYVDRDGKDQGVNVREKAKQLVALLRDEDRLREERAHALKTKEKLAQTATASSAAVGSGPPPEAEQAWPQSSGEEELQLQLALAMSKEEADQEERIRRGDDLRLQMAIEESKRETGGKEESSLMDLADVFTAPAPAPTTDPWGGPAPMAAAVPTAAPTSDPWGGPPVPPAADPWGGPAPTPASGDPWRPAAPAGPSVDPWGGTPAPAAGEGPTPDPWGSSDGGVPVSGPSASDPWTPAPAFSDPWGGSPAKPSTNGTTAAGGFDTEPDEFSDFDRLRTALPTSGSSAGELELLAGEVPARSPGAFDMSGVRGSLAEAVGSPPPAATPTPTPPTRKTPESFLGPNAALVDLDSLVSRPGPTPPGAKASNPFLPGGGPATGPSVTNPFQPAPPATLTLNQLRLSPVPPVPGAPPTYISPLGGGPGLPPMMPPLLALLVNKVPLEPLVLLVPEVPLALLVLLAKMDSTVSLAPLGPLVLAVALVMLVLLVPPALLDLLVPLVLPALVSTSASCPSHLKRRLTMVAATTGLMMPMWFVTVTSRWTPPSRA

SEQ ID NO: 1093 - protein, 87 aa, Homo sapiens
MGGGDLNLKKSWHPQTLRNVEKVWKAEQKHEAERKKIEELQRELREERAREEMQRYAEDVGAVNSPTVCGSAKRSDCCSRSNSDISL

SEQ ID NO: 1094 - protein, 87 aa, Homo sapiens; identical to SEQ ID NO: 1093

SEQ ID NO: 1095 - protein, 286 aa, Homo sapiens
MGACLGACSLLSCASCLCGSAPCILCSCCPASRNSTVSRLIFTFFLFLGVLVSIIMLSPGVESQLYKLPWVCEEGAGIPTVLQGHIDCGSLLGYRAVYRMCFATAAFFFFFTLLMLCVSSSRDPRAAIQNGFWFFKFLILVGLTVGAFYIPDGSFTNIWFYFGVVGSFLFILIQLVLLIDFAHSWNQRWLGKAEECDSRAWYAGLFFFTLLFYLLSIAAVALMFMYYTEPSGCHEGKVFISLNLTFCVCVSIAAVLPKVQDAQPNSGLLQAEGEDRGARADQDPQQ

SEQ ID NO: 1096 - protein, 483 aa, Homo sapiens
MAESIIIRVQSPDGVKRITATKRETAATFLKKVAKEFGFQNNGFSVYINRNKTGEITASSNKSLNLLKIKHGDLLFLFPSSLAGPSSEMETSVPPGFKVFGAPNVVEDEIDQYLSKQDGKIYRSRDPQLCRHGPLGKCVHCVPLEPFDEDYLNHLEPPVKHMSFHAYIRKLTGGADKGKFVALENISCKIKSGCEGHLPWPNGICTKCQPSAITLNRQKYRHVDNIMFENHTVADRFLDFWRKTGNQHFGYLYGRYTEHKDIPLGIRAEVAAIYEPPQIGTQNSLELLEDPKAEVVDEIAAKLGLRKVGWIFTDLVSEDTRKGTVRYSRNKDTYFLSSEECITAGDFQNKHPNMCRLSPDGHFGSKFVTAVATGGPDNQVHFEGYQVSNQCMALVRDECLLPCKDAPELGYAKESSSEQYVPDVFYKVWGRHPWNGRPGNRHHSHLPLGGLQPPGAARAGPIWHHLARGPAEVQTLPLLPTVL

SEQ ID NO: 1097 - protein, 483 aa, Homo sapiens; identical to SEQ ID NO: 1096

SEQ ID NO: 1098 - protein, 42 aa, Homo sapiens
MGVQVETISPGDGRTFPKRGQTCVVHYTGCSENQPCHPCTHL

SEQ ID NO: 1099 - protein, 42 aa, Homo sapiens; identical to SEQ ID NO: 1098

SEQ ID NO: 1100 - protein, 42 aa, Homo sapiens; identical to SEQ ID NO: 1098

SEQ ID NO: 1101 - protein, 42 aa, Homo sapiens; identical to SEQ ID NO: 1098

SEQ ID NO: 1102 - protein, 42 aa, Homo sapiens
MEAQSHSSTTTEKKKVENSIVKCSTRTDVSEKAVASSTTSND

SEQ ID NO: 1103 - protein, 42 aa, Homo sapiens; identical to SEQ ID NO: 1102

SEQ ID NO: 1104 - protein, 499 aa, Homo sapiens
MSIHFSSPVFTSRSAAFSGRGAQVRLSSARPGGLGSSSLYGLGASRPRVAVRSAYGGPVGAGIREVTINQSLLAPLRLDADPSLQRVRQEESEQIKTLNNKFASFIDKVRFLEQQNKLLETKWTLLQEQKSAKSSRLPDIFEAQIAGLRGQLEALQVDGGRLEAELRSMQDVVEDFKNKYEDEINHRTAAENEFVVLKKDVDAAYMSKVELEAKVDALNDEINFLRTLNETELTELQSQISDTSVVLSMDNSRSLDLDGIIAEVKAQYEEMAKCSRAEAEAWYQTKFETLQAQAGKHGDDLRNTRNEISEMNRAIQRLQAEIDNIKNQRAKLEAAIAEAEERGELALKDARAKQASSSSLEKSYELPDGQVITIGNERFRCPEALFQPSFLGMESCGIHETTFNSIMKCDVDIRKDLYANTVLSGGTTMYPGIADRMQKEITALAPSTMKIKIIAPPERKYSVWIGGSILASLSTFQQMWISKQEYDESGPSIVHRKCF

SEQ ID NO: 1105 - protein, 1181 aa, Homo sapiens
MRPMRIFVNDDRHVMAKHSSVYPTQEELEAVQNMVSHTERALKAVSDWIDEQEKGSSEQAESDNMDVPPEDDSKEGAGEQKTEHMTRTLRGVMRVGLVAKGLLLKGDLDLELVLLCKEKPTTALLDKVADNLAIQLAAVTEDKYEILQSVDDAAIVIKNTKEPPLSLTIHLTSPVVREEMEKVLAGETLSVNDPPDVLDRQKCLAALASLRHAKWFQARANGLKSCVIVIRVLRDLCTRVPTWGPLRGWPLELLCEKSIGTANRPMGAGEALRRVLECLASGIVMPDGSGIYDPCEKEATDAIGHLDRQQREDITQSAQHALRLAAFGQLHKVLGMDPLPSKMPKKPKNENPVDYTVQIPPSTTYAITPMKRPMEEDGEEKSPSKKKKKIQKKEEKAEPPQAMNALMRLNQLKPGLQYKLVSQTGPVHAPIFTMSVEVDGNSFEASGPSKKTAKLHVAVKVLQDMGLPTGAEGRDSSKGEDSAEETEAKPAVVAPAPVVEAVSTPSAAFPSDATAEQGPILTKHGKNPVMELNEKRRGLKYELISETGGSHDKRFVMEVEVDGQKFQGAGSNKKVAKAYAALAALEKLFPDTPLALDANKKKRAPVPVRGGPKFAAKPHNPGFGMGGPMHNEVPPPPNLRGRGRGGSIRGRGRGRGFGGANHGGYMNAGAGYGSYGYGGNSATAGYSQFYSNGGHSGNASGAGGGFGLGGGAGFGGGFGGPGFPVCPPGGIQEVTVNQSLLTPLNLQIDPSIQRVRTEEREQIKTLNNKFASFIDKVRFLEQQNKVLDTKWTLLQEQGTKTVRQNLEPLFEQYINNLRRQLDSIVGERGRLDSELRNMQDLVEDFKNKYEDEINKRTTAENEFVMLKKDVDAAYMNKVELEAKVDALMDEINFMKMFFDAELSQMQTHVSDTSVVLSMDNNRNLDLDSIIAEVKAQYEEIANRSRTEAESWYQTKYEELQQTAGRHGDDLRNTKHEISEMNRMIQRLRAEIDNVKKQCANLQNAIADAEQRGELALKDARNKLAELEEALQKAKQDMARLLREYQELMNTKLALDVEIATYRKLLEGEECRLSGEGVGPVNISVVTSSVSSGYGSGSGYGGGLGGGLGGGLGGGLAGGSSGSYYSSSSGGVGLGGGLSVGGSGFSASSGRGLGVGFGSGGGSSSSVKFVSTTSSSRKSFKS

SEQ ID NO: 1106 - protein, 1185 aa, Homo sapiens
MRPMRIFVNDDRHVMAKHSSVYPTQEELEAVQNMVSHTERALKAVSDWIDEQEKGSSEQAESDNMDVPPEDDSKEGAGEQKTEHMTRTLRGVMRVGLVAKGLLLKGDLDLELVLLCKEKPTTALLDKVADNLAIQLAAVTEDKYEILQSVDDAAIVIKNTKEPPLSLTIHLTSPVVREEMEKVLAGETLSVNDPPDVLDRQKCLAALASLRHAKWFQARANGLKSCVIVIRVLRDLCTRVPTWGPLRGWPLELLCEKSIGTANRPMGAGEALRRVLECLASGIVMPDGSGIYDPCEKEATDAIGHLDRQQREDITQSAQHALRLAAFGQLHKVLGMDPLPSKMPKKPKNENPVDYTVQIPPSTTYAITPMKRPMEEDGEEKSPSKKKKKIQKKEEKAEPPQAMNALMRLNQLKPGLQYKLVSQTGPVHAPIFTMSVEVDGNSFEASGPSKKTAKLHVAVKVLQDMGLPTGAEGRDSSKGEDSAEETEAKPAVVAPAPVVEAVSTPSAAFPSDATAENVKQQGPILTKHGKNPVMELNEKRRGLKYELISETGGSHDKRFVMEVEVDGQKFQGAGSNKKVAKAYAALAALEKLFPDTPLALDANKKKRAPVPVRGGPKFAAKPHNPGFGMGGPMHNEVPPPPNLRGRGRGGSIRGRGRGRGFGGANHGGYMNAGAGYGSYGYGGNSATAGYSQFYSNGGHSGNASGAGGGFGLGGGAGFGGGFGGPGFPVCPPGGIQEVTVNQSLLTPLNLQIDPSIQRVRTEEREQIKTLNNKFASFIDKVRFLEQQNKVLDTKWTLLQEQGTKTVRQNLEPLFEQYINNLRRQLDSIVGERGRLDSELRNMQDLVEDFKNKYEDEINKRTTAENEFVMLKKDVDAAYMNKVELEAKVDALMDEINFMKMFFDAELSQMQTHVSDTSVVLSMDNNRNLDLDSIIAEVKAQYEEIANRSRTEAESWYQTKYEELQQTAGRHGDDLRNTKHEISEMNRMIQRLRAEIDNVKKQCANLQNAIADAEQRGELALKDARNKLAELEEALQKAKQDMARLLREYQELMNTKLALDVEIATYRKLLEGEECRLSGEGVGPVNISVVTSSVSSGYGSGSGYGGGLGGGLGGGLGGGLAGGSSGSYYSSSSGGVGLGGGLSVGGSGFSASSGRGLGVGFGSGGGSSSSVKFVSTTSSSRKSFKS

SEQ ID NO: 1107 - protein, 246 aa, Homo sapiens
MARKLSVILILTFALSVTNPLHELKAAAFPQTTEKISPNWESGINVDLAISTRQYHLQQLFYRYGENNSLSVEGFRKLLQNIGIDKIKRIHIHHDHDHHSDHEHHSDHERHSDHEHHSEHEHHSDHDHHSHHNHAASGKNKRKALCPDHDSDSSGKDPRNSQGKGAHRPEHASGRRNVKDSVSASEVTSTVYNTVSEGTHFLETIETPRPGKLFPKDVSSSTPPSVTSKSRVSRRCPGTCPPGRGA

SEQ ID NO: 1108 - protein, 1120 aa, Homo sapiens
MLSFVDTRTLLLLAVTLCLATCQSLQEETVRKGPAGDRGPRGERGPPGPPGRDGEDGPTGPPGPPGPPGPPGLGGNFAAQYDGKGVGLGPGPMGLMGPRGPPGAAGAPGPQGFQGPAGEPGEPGQTGPAGARGPAGPPGKAGEDGHPGKPGRPGERGVVGPQGARGFPGTPGLPGFKGIRGHNGLDGLKGQPGAPGVKGEPGAPGENGTPGQTGARGLPGERGRVGAPGPAGARGSDGSVGPVGPAGPIGSAGPPGFPGAPGPKGEIGAVGNAGPAGPAGPRGEVGLPGLSGPVGPPGNPGANGLTGAKGAAGLPGVAGAPGLPGPRGIPGPVGAAGATGARGLVGEPGPAGSKGESGNKGEPGSAGPQGPPGPSGEEGKRGPNGEAGSAGPPGPPGLRGSPGSRGLPGADGRAGVMGPPGSRGASGPAGVRGPNGDAGRPGEPGLMGPRGLPGSPGNIGPAGKEGPVGLPGIDGRPGPIGPAGARGEPGNIGFPGPKGPTGDPGKNGDKGHAGLAGARGAPGPDGNNGAQGPPGPQGVQGGKGEQGPPGPPGFQGLPGPSGPAGEVGKPGERGLHGEFGLPGPAGPRGERGPPGESGAAGPTGPIGSRGPSGPPGPDGNKGEPGVVGAVGTAGPSGPSGLPGERGAAGIPGGKGEKGEPGLRGEIGNPGRDGARGAPGAVGAPGPAGATGDRGEAGAAGPAGPAGPRGSPGERGEVGPAGPNGFAGPAGAAGQPGAKGERGAKGPKGENGVVGPTGPVGAAGPAGPNGPPGPAGSRGDGGPPGMTGFPGAAGRTGPPGPSGISGPPGPPGPAGKEGLRGPRGDQGPVGRTGEVGAVGPPGFAGEKGPSGEAGTAGPPGTPGPQGLLGAPGILGLPGSRGERGLPGVAGAVGEPGPLGIAGPPGARGPPGAVGSPGVNGAPGEAGRDGNPGNDGPPGRDGQPGHKGERGYPGNIGPVGAAGAPGPHGPVGPAGKHGNRGETGPSGPVGPAGAVGPRGPSGPQGIRGDKGEPGEKGPRGLPGLKGHNGLQGLPGIAGHHGDQGAPGSVGPAGPRGPAGPSGPAGKDGRTGHPGTVGPAGIRGPQGHQGPARAGPGLPGGGRPHELLPATSGSRPEPPAGRG

SEQ ID NO: 1109 - protein, 1120 aa, Homo sapiens; identical to SEQ ID NO: 1108

SEQ ID NO: 1110 - protein, 66 aa, Homo sapiens
AQRRRRRGEGHSGGAGAERRTARHSEAPAQTPLPSCERRSSTVTLKTWKQGTCTRENRAPILRMKM

SEQ ID NO: 1111 - protein, 66 aa, Homo sapiens; identical to SEQ ID NO: 1110

SEQ ID NO: 1112 - protein, 951 aa, Homo sapiens
MEMKKKINLELRNRSPEEVTELVLDNCLCVNGEIEGLNDTFKELEFLSMANVELSSLARLPSLNKLRKLELSDNIISGGLEVLAEKCPNLTYLNLSGNKIKDLSTVEALQNLKNLKSLDLFNCEITNLEDYRESIFELLQQITYLDGFDQEDNEAPDSEEEDDEDGDEDDEEEEENEAGPPEGYEEEEEEEEEEDEDEDEDEDEAGSELGEGEEEVGLSYLMKEEIQDEEDDDDYVEEGEEEEEEEGEEEEGGGNVEKDPDGAKSQEKEEPEISTEKEDSARLDDHEEEEEEDEEPSHNEDHDADDEDDSHMESAEVEKEELPRESFKEVLENQETFLDLNVQPGHSNPEVLMDCGVDLTASCNSEPKELAGDPEAVPESDEEPPPGEQAQKQDQKNSKEVDTEFKEGNPATMEIDSETVQAVQSLTQESSEQDDTFQDCAETQEACRSLQNYTRADQSPQIATTLDDCQQSDHSSPVSSVHSHPGQSVRSVNSPSVPALENSYAQISPDQSAISVPSLQNMETSPMMDVPSVSDHSQQVVDSGFSDLGSIESTTENYENPSSYDSTMGGSICGNGSSQNSCSYSNLTSSSLTQSSCAVTQQMSNISGSCSMLQQTSISSPPTCSVKSPQGCVVERPPSSSQQLAQCSMAANFTPPMQLAEIPETSNANIGLYERMGQSDFGAGHYPQPSATFSLAKLQQLTNTLIDHSLPYSHSAAVTSYANSASLSTPLSNTGLVQLSQSPHSVPGGPQAQATMTPPPNLTPPPMNLPPPLLQRNMAASNIGISHSQRLQTQIASKGHISMRTKSASLSPAAATHQSQIYGRSQTVAMQGPARTLTMQRGMNMSVNLMPAPAYNVNSVNMNMNTLNAMNGYSMSQPMMNSGYHSNHGYMNQTPQYPMQMQMGMMGTQPYAQQPMQTPPHGNMMYTAPGHHGYMNTGMSKQSLNGSYMRR

SEQ ID NO: 1113 - protein, 910 aa, Homo sapiens
MEMKKKINLELRNRSPEEVTELVLDNCLCVNGEIEGLNDTFKELEFLSMANVELSSLARLPSLNKLRKQNLKNLKSLDLFNCEITNLEDYRESIFELLQQITYLDGFDQEDNEAPDSEEEDDEDGDEDDEEEEENEAGPPEGYEEEEEEEEEEDEDEDEDEDEAGSELGEGEEEVGLSYLMKEEIQDEEDDDDYVEEGEEEEEEEGEEEEGGGNVEKDPDGAKSQEKEEPEISTEKEDSARLDDHEEEEEEDEEPSHNEDHDADDEDDSHMESAEVEKEELPRESFKEVLENQETFLDLNVQPGHSNPEVLMDCGVDLTASCNSEPKELAGDPEAVPESDEEPPPGEQAQKQDQKNSKEVDTEFKEGNPATMEIDSETVQAVQSLTQESSEQDDTFQDCAETQEACRSLQNYTRADQSPQIATTLDDCQQSDHSSPVSSVHSHPGQSVRSVNSPSVPALENSYAQISPDQSAISVPSLQNMETSPMMDVPSVSDHSQQVVDSGFSDLGSIESTTENYENPSSYDSTMGGSICGNGSSQNSCSYSNLTSSSLTQSSCAVTQQMSNISGSCSMLQQTSISSPPTCSVKSPQGCVVERPPSSSQQLAQCSMAANFTPPMQLAEIPETSNANIGLYERMGQSDFGAGHYPQPSATFSLAKLQQLTNTLIDHSLPYSHSAAVTSYANSASLSTPLSNTGLVQLSQSPHSVPGGPQAQATMTPPPNLTPPPMNLPPPLLQRNMAASNIGISHSQRLQTQIASKGHISMRTKSASLSPAAATHQSQIYGRSQTVAMQGPARTLTMQRGMNMSVNLMPAPAYNVNSVNMNMNTLNAMNGYSMSQPMMNSGYHSNHGYMNQTPQYPMQMQMGMMGTQPYAQQPMQTPPHGNMMYTAPGHHGYMNTGMSKQSLNGSYMRR

SEQ ID NO: 1114 - protein, 903 aa, Homo sapiens
MANVELSSLARLPSLNKLRKLELSDNIISGGLEVLAEKCPNLTYLNLSGNKIKDLSTVEALQNLKNLKSLDLFNCEITNLEDYRESIFELLQQITYLDGFDQEDNEAPDSEEEDDEDGDEDDEEEEENEAGPPEGYEEEEEEEEEEDEDEDEDEDEAGSELGEGEEEVGLSYLMKEEIQDEEDDDDYVEEGEEEEEEEGEEEEGGGNVEKDPDGAKSQEKEEPEISTEKEDSARLDDHEEEEEEDEEPSHNEDHDADDEDDSHMESAEVEKEELPRESFKEVLENQETFLDLNVQPGHSNPEVLMDCGVDLTASCNSEPKELAGDPEAVPESDEEPPPGEQAQKQDQKNSKEVDTEFKEGNPATMEIDSETVQAVQSLTQESSEQDDTFQDCAETQEACRSLQNYTRADQSPQIATTLDDCQQSDHSSPVSSVHSHPGQSVRSVNSPSVPALENSYAQISPDQSAISVPSLQNMETSPMMDVPSVSDHSQQVVDSGFSDLGSIESTTENYENPSSYDSTMGGSICGNGSSQNSCSYSNLTSSSLTQSSCAVTQQMSNISGSCSMLQQTSISSPPTCSVKSPQGCVVERPPSSSQQLAQCSMAANFTPPMQLAEIPETSNANIGLYERMGQSDFGAGHYPQPSATFSLAKLQQLTNTLIDHSLPYSHSAAVTSYANSASLSTPLSNTGLVQLSQSPHSVPGGPQAQATMTPPPNLTPPPMNLPPPLLQRNMAASNIGISHSQRLQTQIASKGHISMRTKSASLSPAAATHQSQIYGRSQTVAMQGPARTLTMQRGMNMSVNLMPAPAYNVNSVNMNMNTLNAMNGYSMSQPMMNSGYHSNHGYMNQTPQYPMQMQMGMMGTQPYAQQPMQTPPHGNMMYTAPGHHGYMNTGMSKQSLNGSYMRR

SEQ ID NO: 1115 - protein, 1117 aa, Homo sapiens
MFSFVDLRLLLLLAATALLTHGQEEGQVEGQDEDIPPITCVQNGLRYHDRDVWKPEPCRICVCDNGKVLCDDVICDETKNCPGAEVPEGECCPVCPDGSESPTDQETTGVEGPKGDTGPRGPRGPAGPPGRDGIPGQPGLPGPPGPPGPPGPPGLGGNFAPQLSYGYDEKSTGGISVPGPMGPSGPRGLPGPPGAPGPQGFQGPPGEPGEPGASGPMGPRGPPGPPGKNGDDGEAGKPGRPGERGPPGPQGARGLPGTAGLPGMKGHRGFSGLDGAKGDAGPAGPKGEPGSPGENGAPGQMGPRGLPGERGRPGAPGPAGARGNDGATGAAGPPGPTGPAGPPGFPGAVGAKGEAGPQGPRGSEGPQGVRGEPGPPGPAGAAGPAGNPGADGQPGAKGANGAPGIAGAPGFPGARGPSGPQGPGGPPGPKGNSGEPGAPGSKGDTGAKGEPGPVGVQGPPGPAGEEGKRGARGEPGPTGLPGPPGERGGPGSRGFPGADGVAGPKGPAGERGSPGPAGPKGSPGEAGRPGEAGLPGAKGLTGSPGSPGPDGKTGPPGPAGQDGRPGPPGPPGARGQAGVMGFPGPKGAAGEPGKAGERGVPGPPGAVGPAGKDGEAGAQGPPGPAGPAGERGEQGPAGSPGFQGLPGPAGPPGEAGKPGEQGVPGDLGAPGPSGARGERGFPGERGVQGPPGPAGPRGANGAPGNDGAKGDAGAPGAPGSQGAPGLQGMPGERGAAGLPGPKGDRGDAGPKGADGSPGKDGVRGLTGPIGPPGPAGAPGDKGESGPSGPAGPTGARGAPGDRGEPGPPGPAGFAGPPGADGQPGAKGEPGDAGAKGDAGPPGPAGPAGPPGPIGNVGAPGAKGARGSAGPPGATGFPGAAGRVGPPGPSGNAGPPGPPGPAGKEGGKGPRGETGPAGRPGEVGPPGPPGPAGEKGSPGADGPAGAPGTPGPQGIAGQRGVVGLPGQRGERGFPGLPGPSGEPGKQGPSGASGERGPPGPMGPPGLAGPPGESGREGAPGAEGSPGRDGSPGAKGDRGETGPAGPPGAPGAPGAPGPVGPAGKSGDRGETGPAGPTGPVGPVGAPLPRRGRSCWSGRAGWTGAASRPAGATSTSSCAA

SEQ ID NO: 1116 - protein, 1098 aa, Homo sapiens
MFSFVDLRLLLLLAATALLTHGQEEGQVEGQDEDIPPITCVQNGLRYHDRDVWKPEPCRICVCDNGKVLCDDVICDETKNCPGAEVPEGECCPVCPDGSESPTDQETTGVEGPKGDTGPRGPRGPAGPPGRDGIPGQPGLPGPPGPPGPPGPPGLGGNFAPQLSYGYDEKSTGGISVPGPMGPSGPRGLPGPPGAPGPQGFQGPPGEPGEPGASGPMGPRGPPGPPGKNGDDGEAGKPGRPGERGPPGPQGARGLPGTAGLPGMKGHRGFSGLDGAKGDAGPAGPKGEPGSPGENGAPGQMGPRGLPGERGRPGAPGPAGARGNDGATGAAGPPGPTGPAGPPGFPGAVGAKGEAGPQGPRGSEGPQGVRGEPGPPGPAGAAGPAGNPGADGQPGAKGANGAPGIAGAPGFPGARGPSGPQGPGGPPGPKGNSGEPGAPGSKGDTGAKGEPGPVGVQGPPGPAGEEGKRGARGEPGPTGLPGPPGERGGPGSRGFPGADGVAGPKGPAGERGSPGPAGPKGSPGEAGRPGEAGLPGAKGLTGSPGSPGPDGKTGPPGPAGQDGRPGPPGPPGARGQAGVMGFPGPKGAAGEPGKAGERGVPGPPGAVGPAGKDGEAGAQGPPGPAGPAGERGEQGPAGSPGFQGLPGPAGPPGEAGKPGEQGVPGDLGAPGPSGARGERGFPGERGVQGPPGPAGPRGANGAPGNDGAKGDAGAPGAPGSQGAPGLQGMPGERGAAGLPGPKGDRGDAGPKGADGSPGKDGVRGLTGPIGPPGPAGAPGDKGESGPSGPAGPTGARGAPGDRGEPGPPGPAGFAGPPGADGQPGAKGEPGDAGAKGDAGPPGPAGPAGPPGPIGNVGAPGAKGARGSAGPPGATGFPGAAGRVGPPGPSGNAGPPGPPGPAGKEGGKGPRGETGPAGRPGEVGPPGPPGPAGEKGSPGADGPAGAPGTPGPQGIAGQRGVVGLPGQRGERGFPGLPGPSGEPGKQGPSGASGERGPPGPMGPPGLAGPPGESGREGAPGAEGSPGRDGSPGAKGDRGETGPAGPPGAPGAPGAPGPVGPAGKSGDRGETGPAGPTGPVGPVGARWRCQAAGASARAEH

SEQ ID NO: 1117 - protein, 1098 aa, Homo sapiens; identical to SEQ ID NO: 1116

SEQ ID NO: 1118 - protein, 1079 aa, Homo sapiens
MFSFVDLRLLLLLAATALLTHGQEEGQVEGQDEDIPPITCVQNGLRYHDRDVWKPEPCRICVCDNGKVLCDDVICDETKNCPGAEVPEGECCPVCPDGSESPTDQETTGVEGPKGDTGPRGPRGPAGPPGRDGIPGQPGLPGPPGPPGPPGPPGLGGNFAPQLSYGYDEKSTGGISVPGPMGPSGPRGLPGPPGAPGPQGFQGPPGEPGEPGASGPMGPRGPPGPPGKNGDDGEAGKPGRPGERGPPGPQGARGLPGTAGLPGMKGHRGFSGLDGAKGDAGPAGPKGEPGSPGENGAPGQMGPRGLPGERGRPGAPGPAGARGNDGATGAAGPPGPTGPAGPPGFPGAVGAKGEAGPQGPRGSEGPQGVRGEPGPPGPAGAAGPAGNPGADGQPGAKGANGAPGIAGAPGFPGARGPSGPQGPGGPPGPKGNSGEPGAPGSKGDTGAKGEPGPVGVQGPPGPAGEEGKRGARGEPGPTGLPGPPGERGGPGSRGFPGADGVAGPKGPAGERGSPGPAGPKGSPGEAGRPGEAGLPGAKGLTGSPGSPGPDGKTGPPGPAGQDGRPGPPGPPGARGQAGVMGFPGPKGAAGEPGKAGERGVPGPPGAVGPAGKDGEAGAQGPPGPAGPAGERGEQGPAGSPGFQGLPGPAGPPGEAGKPGEQGVPGDLGAPGPSGARGERGFPGERGVQGPPGPAGPRGANGAPGNDGAKGDAGAPGAPGSQGAPGLQGMPGERGAAGLPGPKGDRGDAGPKGADGSPGKDGVRGLTGPIGPPGPAGAPGDKGESGPSGPAGPTGARGAPGDRGEPGPPGPAGFAGPPGADGQPGAKGEPGDAGAKGDAGPPGPAGPAGPPGPIGNVGAPGAKGARGSAGPPGATGFPGAAGRVGPPGPSGNAGPPGPPGPAGKEGGKGPRGETGPAGRPGEVGPPGPPGPAGEKGSPGADGPAGAPGTPGPQGIAGQRGVVGLPGQRGERGFPGLPGPSGEPGKQGPSGASGERGPPGPMGPPGLAGPPGESGREGAPGAEGSPGRDGSPGAKGDRGETGPAGPPGAPGAPGAPGPVGPAGKSGDRGETGPCATISRWR

SEQ ID NO: 1119 - protein, 1079 aa, Homo sapiens; identical to SEQ ID NO: 1118

SEQ ID NO: 1120 - protein, 1079 aa, Homo sapiens; identical to SEQ ID NO: 1118

SEQ ID NO: 1121 - protein, 1079 aa, Homo sapiens; identical to SEQ ID NO: 1118

SEQ ID NO: 1122 - protein, 1079 aa, Homo sapiens; identical to SEQ ID NO: 1118

SEQ ID NO: 1123 - protein, 1079 aa, Homo sapiens; identical to SEQ ID NO: 1118

SEQ ID NO: 1124 - protein, 1079 aa, Homo sapiens; identical to SEQ ID NO: 1118

SEQ ID NO: 1125 - protein, 1079 aa, Homo sapiens; identical to SEQ ID NO: 1118

SEQ ID NO: 1126 - protein, 413 aa, Homo sapiens
MSPAPRPPRCLLLPLLTLGTALASLGSAQSSSFSPEAWLQQYGYLPPGDLRTHTQRSPQSLSAAIAAMQKFYGLQVTGKADADTMKAMRRPRCGVPDKFGAEIKANVRRKRYAIQGLKWQHNEITFCIQNYTPKVGEYATYEAIRKAFRVWESATPLRFREVPYAYIREGHEKQADIMIFFAEGFHGDSTPFDGEGGFLAHAYFPGPNIGGDTHFDSAEPWTVRNEDLNGNDIFLVAVHELGHALGLEHSSDPSAIMAPFYQWMDTENFVLPDDDRRGIQQLYGGESGFPTKMPPQPRTTSRPSVPDKPKNPTYGPNICDGNFDTVAMLRGEMFVFKERWFWRVRNNQVMDGYPMPIGQFWRGLPASINTAYERKDGKFVFFKGGSAALRHSSSLPSWAWSPVASTKLPSTPS

SEQ ID NO: 1127 - protein, 662 aa, Homo sapiens
MSRQSSVSFRSGGSRSFSTASAITPSVSRTSFTSVSRSGGGGGGGFGRVSLAGACGVGGYGSRSLYNLGGSKRISISTSGGSFRNRFGAGAGGGYGFGGGAGSGFGFGGGAGGGFGLGGGAGFGGGFGGPGFPVCPPGGIQEVTVNQSLLTPLNLQIDPSIQRVRTEEREQIKTLNNKFASFIDKVRFLEQQNKVLDTKWTLLQEQGTKTVRQNLEPLFEQYINNLRRQLDSIVGERGRLDSELRNMQDLVEDFKNKYEDEINKRTTAENEFVMLKKDVDAAYMNKVELEAKVDALMDEINFMKMFFDAELSQMQTHVSDTSVVLSMDNNRNLDLDSIIAEVKAQYEEIANRSRTEAESWYQTKYEELQQTAGRHGDDLRNTKHEISEMNRMIQRLRAEIDNVKKQCANLQNAIADAEQRGELALKDARNKLAELEEALQKAKQDMARLLREYQELMNTKLALDVEIATYRKLLEGEECRLSGEGVGPVNISVVTSSVSSGYGSGSGYGGGLGGGLGGGLGGGLAGGSSGSYYSSSSGGVGLGGGLSVGGSGFSASSGRGLGVGFGSGGGSSSSVKFVGGGGPGYGNQGGGYGGGYDNYGGGNYGSGNYNDFGNYNQQPSNYGPMKSGNFGGSRNMGGPYGGGNYGPGGSGGSGGYGGRSRY

SEQ ID NO: 1128 - protein, 662 aa, Homo sapiens; identical to SEQ ID NO: 1127

SEQ ID NO: 1129 - protein, 1921 aa, Homo sapiens
MLRGPGPGLLLLAVQCLGTAVPSTGASKSKRQAQQMVQPQSPVAVSQSKPGCYDNGKHYQINQQWERTYLGNALVCTCYGGSRGFNCESKPEAEETCFDKYTGNTYRVGDTYERPKDSMIWDCTCIGAGRGRISCTIANRCHEGGQSYKIGDTWRRPHETGGYMLECVCLGNGKGEWTCKPIAEKCFDHAAGTSYVVGETWEKPYQGWMMVDCTCLGEGSGRITCTSRNRCNDQDTRTSYRIGDTWSKKDNRGNLLQCICTGNGRGEWKCERHTSVQTTSSGSGPFTDVRAAVYQPQPHPQPPPYGHCVTDSGVVYSVGMQWLKTQGNKQMLCTCLGNGVSCQETAVTQTYGGNSNGEPCVLPFTYNGRTFYSCTTEGRQDGHLWCSTTSNYEQDQKYSFCTDHTVLVQTRGGNSNGALCHFPFLYNNHNYTDCTSEGRRDNMKWCGTTQNYDADQKFGFCPMAAHEEICTTNEGVMYRIGDQWDKQHDMGHMMRCTCVGNGRGEWTCIAYSQLRDQCIVDDITYNVNDTFHKRHEEGHMLNCTCFGQGRGRWKCDPVDQCQDSETGTFYQIGDSWEKYVHGVRYQCYCYGRGIGEWHCQPLQTYPSSSGPVEVFITETPSQPNSHPIQWNAPQPSHISKYILRWRPKNSVGRWKEATIPGHLNSYTIKGLKPGVVYEGQLISIQQYGHQEVTRFDFTTTSTSTPVTSNTVTGETTPFSPLVATSESVTEITASSFVVSWVSASDTVSGFRVEYELSEEGDEPQYLDLPSTATSVNIPDLLPGRKYIVNVYQISEDGEQSLILSTSQTTAPDAPPDTTVDQVDDTSIVVRWSRPQAPITGYRIVYSPSVEGSSTELNLPETANSVTLSDLQPGVQYNITIYAVEENQESTPVVIQQETTGTPRSDTVPSPRDLQFVEVTDVKVTIMWTPPESAVTGYRVDVIPVNLPGEHGQRLPISRNTFAEVTGLSPGVTYYFKVFAVSHGRESKPLTAQQTTKLDAPTNLQFVNETDSTVLVRWTPPRAQITGYRLTVGLTRRGQPRQYNVGPSVSKYPLRNLQPASEYTVSLVAIKGNQESPKATGVFTTLQPGSSIPPYNTEVTETTIVITWTPAPRIGFKLGVRPSQGGEAPREVTSDSGSIVVSGLTPGVEYVYTIQVLRDGQERDAPIVNKVVTPLSPPTNLHLEANPDTGVLTVSWERSTTPDITGYRITTTPTNGQQGNSLEEVVHADQSSCTFDNLSPGLEYNVSVYTVKDDKESVPISDTIIPAVPPPTDLRFTNIGPDTMRVTWAPPPSIDLTNFLVRYSPVKNEEDVAELSISPSDNAVVLTNLLPGTEYVVSVSSVYEQHESTPLRGRQKTGLDSPTGIDFSDITANSFTVHWIAPRATITGYRIRHHPEHFSGRPREDRVPHSRNSITLTNLTPGTEYVVSIVALNGREESPLLIGQQSTVSDVPRDLEVVAATPTSLLISWDAPAVTVRYYRITYGETGGNSPVQEFTVPGSKSTATISGLKPGVDYTITVYAVTGRGDSPASSKPISINYRTEIDKPSQMQVTDVQDNSISVKWLPSSSPVTGYRVTTTPKNGPGPTKTKTAGPDQTEMTIEGLQPTVEYVVSVYAQNPSGESQPLVQTAVTNIDRPKGLAFTDVDVDSIKIAWESPQGQVSRYRVTYSSPEDGIHELFPAPDGEEDTAELQGLRPGSEYTVSVVALHDDMESQPLIGTQSTAIPAPTDLKFTQVTPTSLSAQWTPPNVQLTGYRVRVTPKEKTGPMKEINLAPDSSSVVVSGLMVATKYEVSVYALKDTLTSRPAQGVVTTLENVSPPRRARVTDATETTITISWRTKTETITGFQVDAVPANGQTPIQRTIKPDVRSYTITGLQPGTDYKIYLYTLNDNARSSPVVIDASTAIDAPSNLRFLATTRGGGAG

SEQ ID NO: 1130 - protein, 2012 aa, Homo sapiens
MLRGPGPGLLLLAVQCLGTAVPSTGASKSKRQAQQMVQPQSPVAVSQSKPGCYDNGKHYQINQQWERTYLGNALVCTCYGGSRGFNCESKPEAEETCFDKYTGNTYRVGDTYERPKDSMIWDCTCIGAGRGRISCTIANRCHEGGQSYKIGDTWRRPHETGGYMLECVCLGNGKGEWTCKPIAEKCFDHAAGTSYVVGETWEKPYQGWMMVDCTCLGEGSGRITCTSRNRCNDQDTRTSYRIGDTWSKKDNRGNLLQCICTGNGRGEWKCERHTSVQTTSSGSGPFTDVRAAVYQPQPHPQPPPYGHCVTDSGVVYSVGMQWLKTQGNKQMLCTCLGNGVSCQETAVTQTYGGNSNGEPCVLPFTYNGRTFYSCTTEGRQDGHLWCSTTSNYEQDQKYSFCTDHTVLVQTRGGNSNGALCHFPFLYNNHNYTDCTSEGRRDNMKWCGTTQNYDADQKFGFCPMAAHEEICTTNEGVMYRIGDQWDKQHDMGHMMRCTCVGNGRGEWTCIAYSQLRDQCIVDDITYNVNDTFHKRHEEGHMLNCTCFGQGRGRWKCDPVDQCQDSETGTFYQIGDSWEKYVHGVRYQCYCYGRGIGEWHCQPLQTYPSSSGPVEVFITETPSQPNSHPIQWNAPQPSHISKYILRWRPKNSVGRWKEATIPGHLNSYTIKGLKPGVVYEGQLISIQQYGHQEVTRFDFTTTSTSTPVTSNTVTGETTPFSPLVATSESVTEITASSFVVSWVSASDTVSGFRVEYELSEEGDEPQYLDLPSTATSVNIPDLLPGRKYIVNVYQISEDGEQSLILSTSQTTAPDAPPDTTVDQVDDTSIVVRWSRPQAPITGYRIVYSPSVEGSSTELNLPETANSVTLSDLQPGVQYNITIYAVEENQESTPVVIQQETTGTPRSDTVPSPRDLQFVEVTDVKVTIMWTPPESAVTGYRVDVIPVNLPGEHGQRLPISRNTFAEVTGLSPGVTYYFKVFAVSHGRESKPLTAQQTTKLDAPTNLQFVNETDSTVLVRWTPPRAQITGYRLTVGLTRRGQPRQYNVGPSVSKYPLRNLQPASEYTVSLVAIKGNQESPKATGVFTTLQPGSSIPPYNTEVTETTIVITWTPAPRIGFKLGVRPSQGGEAPREVTSDSGSIVVSGLTPGVEYVYTIQVLRDGQERDAPIVNKVVTPLSPPTNLHLEANPDTGVLTVSWERSTTPDITGYRITTTPTNGQQGNSLEEVVHADQSSCTFDNLSPGLEYNVSVYTVKDDKESVPISDTIIPEVPQLTDLSFVDITDSSIGLRWTPLNSSTIIGYRITVVAAGEGIPIFEDFVDSSVGYYTVTGLEPGIDYDISVITLINGGESAPTTLTQQTAVPPPTDLRFTNIGPDTMRVTWAPPPSIDLTNFLVRYSPVKNEEDVAELSISPSDNAVVLTNLLPGTEYVVSVSSVYEQHESTPLRGRQKTGLDSPTGIDFSDITANSFTVHWIAPRATITGYRIRHHPEHFSGRPREDRVPHSRNSITLTNLTPGTEYVVSIVALNGREESPLLIGQQSTVSDVPRDLEVVAATPTSLLISWDAPAVTVRYYRITYGETGGNSPVQEFTVPGSKSTATISGLKPGVDYTITVYAVTGRGDSPASSKPISINYRTEIDKPSQMQVTDVQDNSISVKWLPSSSPVTGYRVTTTPKNGPGPTKTKTAGPDQTEMTIEGLQPTVEYVVSVYAQNPSGESQPLVQTAVTNIDRPKGLAFTDVDVDSIKIAWESPQGQVSRYRVTYSSPEDGIHELFPAPDGEEDTAELQGLRPGSEYTVSVVALHDDMESQPLIGTQSTAIPAPTDLKFTQVTPTSLSAQWTPPNVQLTGYRVRVTPKEKTGPMKEINLAPDSSSVVVSGLMVATKYEVSVYALKDTLTSRPAQGVVTTLENVSPPRRARVTDATETTITISWRTKTETITGFQVDAVPANGQTPIQRTIKPDVRSYTITGLQPGTDYKIYLYTLNDNARSSPVVIDASTAIDAPSNLRFLATTRGGGAG

SEQ ID NO: 1131 - protein, 1831 aa, Homo sapiens
MLRGPGPGLLLLAVQCLGTAVPSTGASKSKRQAQQMVQPQSPVAVSQSKPGCYDNGKHYQINQQWERTYLGNALVCTCYGGSRGFNCESKPEAEETCFDKYTGNTYRVGDTYERPKDSMIWDCTCIGAGRGRISCTIANRCHEGGQSYKIGDTWRRPHETGGYMLECVCLGNGKGEWTCKPIAEKCFDHAAGTSYVVGETWEKPYQGWMMVDCTCLGEGSGRITCTSRNRCNDQDTRTSYRIGDTWSKKDNRGNLLQCICTGNGRGEWKCERHTSVQTTSSGSGPFTDVRAAVYQPQPHPQPPPYGHCVTDSGVVYSVGMQWLKTQGNKQMLCTCLGNGVSCQETAVTQTYGGNSNGEPCVLPFTYNGRTFYSCTTEGRQDGHLWCSTTSNYEQDQKYSFCTDHTVLVQTRGGNSNGALCHFPFLYNNHNYTDCTSEGRRDNMKWCGTTQNYDADQKFGFCPMAAHEEICTTNEGVMYRIGDQWDKQHDMGHMMRCTCVGNGRGEWTCIAYSQLRDQCIVDDITYNVNDTFHKRHEEGHMLNCTCFGQGRGRWKCDPVDQCQDSETGTFYQIGDSWEKYVHGVRYQCYCYGRGIGEWHCQPLQTYPSSSGPVEVFITETPSQPNSHPIQWNAPQPSHISKYILRWRPKNSVGRWKEATIPGHLNSYTIKGLKPGVVYEGQLISIQQYGHQEVTRFDFTTTSTSTPVTSNTVTGETTPFSPLVATSESVTEITASSFVVSWVSASDTVSGFRVEYELSEEGDEPQYLDLPSTATSVNIPDLLPGRKYIVNVYQISEDGEQSLILSTSQTTAPDAPPDTTVDQVDDTSIVVRWSRPQAPITGYRIVYSPSVEGSSTELNLPETANSVTLSDLQPGVQYNITIYAVEENQESTPVVIQQETTGTPRSDTVPSPRDLQFVEVTDVKVTIMWTPPESAVTGYRVDVIPVNLPGEHGQRLPISRNTFAEVTGLSPGVTYYFKVFAVSHGRESKPLTAQQTTKLDAPTNLQFVNETDSTVLVRWTPPRAQITGYRLTVGLTRRGQPRQYNVGPSVSKYPLRNLQPASEYTVSLVAIKGNQESPKATGVFTTLQPGSSIPPYNTEVTETTIVITWTPAPRIGFKLGVRPSQGGEAPREVTSDSGSIVVSGLTPGVEYVYTIQVLRDGQERDAPIVNKVVTPLSPPTNLHLEANPDTGVLTVSWERSTTPDITGYRITTTPTNGQQGNSLEEVVHADQSSCTFDNLSPGLEYNVSVYTVKDDKESVPISDTIIPAVPPPTDLRFTNIGPDTMRVTWAPPPSIDLTNFLVRYSPVKNEEDVAELSISPSDNAVVLTNLLPGTEYVVSVSSVYEQHESTPLRGRQKTGLDSPTGIDFSDITANSFTVHWIAPRATITGYRIRHHPEHFSGRPREDRVPHSRNSITLTNLTPGTEYVVSIVALNGREESPLLIGQQSTVSDVPRDLEVVAATPTSLLISWDAPAVTVRYYRITYGETGGNSPVQEFTVPGSKSTATISGLKPGVDYTITVYAVTGRGDSPASSKPISINYRTEIDKPSQMQVTDVQDNSISVKWLPSSSPVTGYRVTTTPKNGPGPTKTKTAGPDQTEMTIEGLQPTVEYVVSVYAQNPSGESQPLVQTAVTTIPAPTDLKFTQVTPTSLSAQWTPPNVQLTGYRVRVTPKEKTGPMKEINLAPDSSSVVVSGLMVATKYEVSVYALKDTLTSRPAQGVVTTLENVSPPRRARVTDATETTITISWRTKTETITGFQVDAVPANGQTPIQRTIKPDVRSYTITGLQPGTDYKIYLYTLNDNARSSPVVIDASTAIDAPSNLRFLATTRGGGAG

SEQ ID NO: 1132 - protein, 1831 aa, Homo sapiens; identical to SEQ ID NO: 1131

SEQ ID NO: 1133 - protein, 1921 aa, Homo sapiens; identical to SEQ ID NO: 1129

SEQ ID NO: 1134 - protein, 1417 aa, Homo sapiens
MKTRQNKDSMSMRSGRKKEAPGPREELRSRGRASPGGVSTSSSDGKAEKSRQTAKKARVEEASTPKVNKQGRSEEISESESEETNAPKKTKTEQELPRPQSPSDLDSLDGRSLNDDGSSDPRDIDQDNRSTSPSIYSPGSVENDSDSSSGLSQGPARPYHPPPLFPPSPQPPDSTPRQPEASFEPHPSVTPTGYHAPMEPPTSRMFQAPPGAPPPHPQLYPGGTGGVLSGPPMGPKGGGAASSVGGPNGGKQHPPPTTPISVSSSGASGAPPTKPPTTPVGGGNLPSAPPPANFPHVTPNLPPPPALRPLNNASASPPGLGAQPLPGHLPSPHAMGQGMGGLPPGPEKGPTLAPSPHSLPPASSSAPAPPMRFPYSSSSSSSAAASSSSSSSSSSASPFPASQALPSYPHSFPPPTSLSVSNQPPKYTQPSLPSQAVWSQGPPPPPPYGRLLANSNAHPGPFPPSTGAQSTAHPPVSTHHHHHQQQQQQQQQQQQQQQQQQQHHGNSGPPPPGAFPHPLEGGSSHHAHPYAMSPSLGSLRPYPPGPAHLPPPHSQVSYSQAGPNGPPVSSSSNSSSSTSQGSYPCSHPSPSQGPQGAPYPFPPVPTVTTSSATLSTVIATVASSPAGYKTASPPGPPPYGKRAPSPGAYKTATPPGYKPGSPPSFRTGTPPGYRGTSPPAGPGTFKPGSPTVGPGPLPPAGPSGLPSLPPPPAAPASGPPLSATQIKQEPAEEYETPESPVPPARSPSPPPKVVDVPSHASQSARFNKHLDRGFNSCARSDLYFVPLEGSKLAKKRADLVEKVRREAEQRAREEKEREREREREKEREREKERELERSVKLAQEGRAPVECPSLGPVPHRPPFEPGSAVATVPPYLGPDTPALRTLSEYARPHVMSPGNRNHPFYVPLGAVDPGLLGYNVPALYSSDPAAREREREARERDLRDRLKPGFEVKPSELEPLHGVPGPGLDPFPRHGGLALQPGPPGLHPFPFHPSLGPLERERLALAAGPALRPDMSYAERLAAERQHAERVAALGNDPLARLQMLNVTPAGGDGLLVGSEKVTMQNLNDRLASYLDKVRALEEANADLEVKIRDWYQRQRPAEIKDYSPYFKTIEDLRNKILTATVDNANVLLQIDNARLAADDFRTKYETELNLRMSVEADINGLRRVLDELTLARADLEMQIESLKEELAYLKKNHEEEMNALRGQVGGDVNVEMDAAPGVDLSRILNEMRDQYEKMAEKNRKDAEEWFFTKTEELNREVATNSELVQSGKSEISELRRTMQNLEIELQSQLSMKASLENSLEETKGRYCMQLAQIQEMIGSVEEQLAQLRCEMEQQNQEYKILLDVKTRLEQEIATYRRLLEGEDAHLSSSQFSSGSQSSRDVTSSSRQIRTKVMDVHDGKVVSTHEQVLRTKN

SEQ ID NO: 1135 - protein, 1417 aa, Homo sapiens; identical to SEQ ID NO: 1134

SEQ ID NO: 1136 - protein, 57 aa, Homo sapiens
LKKNQGSRESEQPPSPQGVKGGGRLEKEPGRVAGRPRDPSPLTPFLPTGPWPKIYFS

SEQ ID NO: 1137 - protein, 38 aa, Homo sapiens
VVPLKGRAPPSACPPPAPPLPRLNRLRSSRNAPQKGSW

SEQ ID NO: 1138 - protein, 27 aa, Homo sapiens
KRAGVIREDRGHMWGGQELPYNQPGNP

SEQ ID NO: 1139 - protein, 7 aa, Homo sapiens
PSLARNP

SEQ ID NO: 1140 - protein, 326 aa, Homo sapiens
MMFRDQVGILAGWFKGWNECEQTVALLSLLKRVTRTQARFLQLCLEHSLADCNDIHLLESEANSAAIVSQWQQESKEKVVSLLLSHLPLLQPGNTEAKSEYMRLLQKVLAYSIESNAFIEESRQLLSYALIHPATTLEDRNALALWLSHLEERLASGFRSRPEPSYHSRQGSDEWGGPAELGPGEAGPGWQDKPPRENGHVPFHPSSSVPPAINSIGSNANTGLPCQIHPSPLKRSMSLIPTSPQVPGEWPSPEELGARAAFTTPDHAPLSPQSSVASSGSEQTEEQGSTGLQRDRDPRRGQQPLHLQRHCRWLHESHRSLGQDSD

SEQ ID NO: 1141 - protein, 326 aa, Homo sapiens; identical to SEQ ID NO: 1140

SEQ ID NO: 1142 - protein, 905 aa, Homo sapiens
MGRDQRAVAGPALRRWLLLGTVTVGFLAQSVLAGVKKFDVPCGGRDCSGGCQCYPEKGGRGQPGPVGPQGYNGPPGLQGFPGLQGRKGDKGERGAPGVTGPKGDVGARGVSGFPGADGIPGHPGQGGPRGRPGYDGCNGTQGDSGPQGPPGSEGFTGPPGPQGPKGQKGEPYALPKEERDRYRGEPGEPGLVGFQGPPGRPGHVGQMGPVGAPGRPGPPGPPGPKGQQGNRGLGFYGVKGEKGDVGQPGPNGIPSDTLHPIIAPTGVTFHPDQYKGEKGSEGEPGIRGISLKGEEGIMGFPGLRGYPGLSGEKGSPGQKGSRGLDGYQGPDGPRGPKGEAGDPGPPGLPAYSPHPSLAKGARGDPGFPGAQGEPGSQGEPGDPGLPGPPGLSIGDGDQRRGLPGEMGPKGFIGDPGIPALYGGPPGPDGKRGPPGPPGLPGPPGPDGFLFGLKGAKGRAGFPGLPGSPGARGPKGWKGDAGECRCTEGDEAIKGLPGLPGPKGFAGINGEPGRKGDRGDPGQHGLPGFPGLKGVPGNIGAPGPKGAKGDSRTITTKGERGQPGVPGVPGMKGDDGSPGRDGLDGFPGLPGPPGDGIKGPPGDPGYPGIPGTKGTPGEMGPPGLGLPGLKGQRGFPGDAGLPGPPGFLGPPGPAGTPGQIDCDTDVKRAVGGDRQEAIQPGCIGGPKGLPGLPGPPGPTGAKGLRGIPGFAGADGGPGPRGLPGDAGREGFPGPPGFIGPRGSKGAVGLPGPDGSPGPIGLPGPDGPPGERGLPGEVLGAQPGPRGDAGVPGQPGLKGLPGDRGPPGFRGSQGMPGMPGLKGQPGLPGPSGQPGLYGPPGLHGFPGAPGQEGPLGLPGIPGREGLPGDRGDPGDTGAPGPVGMKGLSVMLVPKVLMALLAKMASVV

SEQ ID NO: 1143 - protein, 2723 aa, Homo sapiens
MGRDQRAVAGPALRRWLLLGTVTVGFLAQSVLAGVKKFDVPCGGRDCSGGCQCYPEKGGRGQPGPVGPQGYNGPPGLQGFPGLQGRKGDKGERGAPGVTGPKGDVGARGVSGFPGADGIPGHPGQGGPRGRPGYDGCNGTQGDSGPQGPPGSEGFTGPPGPQGPKGQKGEPYALPKEERDRYRGEPGEPGLVGFQGPPGRPGHVGQMGPVGAPGRPGPPGPPGPKGQQGNRGLGFYGVKGEKGDVGQPGPNGIPSDTLHPIIAPTGVTFHPDQYKGEKGSEGEPGIRGISLKGEEGIMGFPGLRGYPGLSGEKGSPGQKGSRGLDGYQGPDGPRGPKGEAGDPGPPGLPAYSPHPSLAKGARGDPGFPGAQGEPGSQGEPGDPGLPGPPGLSIGDGDQRRGLPGEMGPKGFIGDPGIPALYGGPPGPDGKRGPPGPPGLPGPPGPDGFLFGLKGAKGRAGFPGLPGSPGARGPKGWKGDAGECRCTEGDEAIKGLPGLPGPKGFAGINGEPGRKGDRGDPGQHGLPGFPGLKGVPGNIGAPGPKGAKGDSRTITTKGERGQPGVPGVPGMKGDDGSPGRDGLDGFPGLPGPPGDGIKGPPGDPGYPGIPGTKGTPGEMGPPGLGLPGLKGQRGFPGDAGLPGPPGFLGPPGPAGTPGQIDCDTDVKRAVGGDRQEAIQPGCIGGPKGLPGLPGPPGPTGAKGLRGIPGFAGADGGPGPRGLPGDAGREGFPGPPGFIGPRGSKGAVGLPGPDGSPGPIGLPGPDGPPGERGLPGEVLGAQPGPRGDAGVPGQPGLKGLPGDRGPPGFRGSQGMPGMPGLKGQPGLPGPSGQPGLYGPPGLHGFPGAPGQEGPLGLPGIPGREGLPGDRGDPGDTGAPGPVGMKGLSGDRGDAGFTGEQGHPGSPGFKGIDGMPGTPGLKGDRGSPGMDGFQGMPGLKGRPGFPGSKGEAGFFGIPGLKGLAGEPGFKGSRGDPGPPGPPPVILPGMKDIKGEKGDEGPMGLKGYLGAKGIQGMPGIPGLSGIPGLPGRPGHIKGVKGDIGVPGIPGLPGFPGVAGPPGITGFPGFIGSRGDKGAPGRAGLYGEIGATGDFGDIGDTINLPGRPGLKGERGTTGIPGLKGFFGEKGTEGDIGFPGITGVTGVQGPPGLKGQTGFPGLTGPPGSQGELGRIGLPGGKGDDGWPGAPGLPGFPGLRGIRGLHGLPGTKGFPGSPGSDIHGDPGFPGPPGERGDPGEANTLPGPVGVPGQKGDQGAPGERGPPGSPGLQGFPGITPPSNISGAPGDKGAPGIFGLKGYRGPPGPPGSAALPGSKGDTGNPGAPGTPGTKGWAGDSGPQGRPGVFGLPGEKGPRGEQGFMGNTGPTGAVGDRGPKGPKGDTGPRGPRGPAGPPGRDGIPGQPGLPGPPGPPGPPGPPGLGGNFAPQLSYGYDEKSTGGISVPGPMGPSGPRGLPGPPGAPGPQGFQGPPGEPGEPGASGPMGPRGPPGPPGKNGDDGEAGKPGRPGERGPPGPQGARGLPGTAGLPGMKGHRGFSGLDGAKGDAGPAGPKGEPGSPGENGAPGQMGPRGLPGERGRPGAPGPAGARGNDGATGAAGPPGPTGPAGPPGFPGAVGAKGEAGPQGPRGSEGPQGVRGEPGPPGPAGAAGPAGNPGADGQPGAKGANGAPGIAGAPGFPGARGPSGPQGPGGPPGPKGNSGEPGAPGSKGDTGAKGEPGPVGVQGPPGPAGEEGKRGARGEPGPTGLPGPPGERGGPGSRGFPGADGVAGPKGPAGERGSPGPAGPKGSPGEAGRPGEAGLPGAKGLTGSPGSPGPDGKTGPPGPAGQDGRPGPPGPPGARGQAGVMGFPGPKGAAGEPGKAGERGVPGPPGAVGPAGKDGEAGAQGPPGPAGPAGERGEQGPAGSPGFQGLPGPAGPPGEAGKPGEQGVPGDLGAPGPSGARGERGFPGERGVQGPPGPAGPRGANGAPGNDGAKGDAGAPGAPGSQGAPGLQGMPGERGAAGLPGPKGDRGDAGPKGADGSPGKDGVRGLTGPIGPPGPAGAPGDKGESGPSGPAGPTGARGAPGDRGEPGPPGPAGFAGPPGADGQPGAKGEPGDAGAKGDAGPPGPAGPAGPPGPIGNVGAPGAKGARGSAGPPGATGFPGAAGRVGPPGPSGNAGPPGPPGPAGKEGGKGPRGETGPAGRPGEVGPPGPPGPAGEKGSPGADGPAGAPGTPGPQGIAGQRGVVGLPGQRGERGFPGLPGPSGEPGKQGPSGASGERGPPGPMGPPGLAGPPGESGREGAPGAEGSPGRDGSPGAKGDRGETGPAGPPGAPGAPGAPGPVGPAGKSGDRGETGPAGPTGPVGPVGARGPAGPQGPRGDKGETGEQGDRGIKGHRGFSGLQGPPGPPGSPGEQGPSGASGPAGPRGPPGSAGAPGKDGLNGLPGPIGPPGPRGRTGDAGPVGPPGPPGPPGPPGPPSAGFDFSFLPQPPQEKAHDGGRYYRADDANVVRDRDLEVDTTLKSLSQQIENIRSPEGSRKNPARTCRDLKMCHSDWKSGEYWIDPNQGCNLDAIKVFCNMETGETCVYPTQPSVAQKNWYISKNPKDKRHVWFGESMTDGFQFEYGGQGSDPADVAIQLTFLRLMSTEASQNITYHCKNSVAYMDQQTGNLKKALLLQGSNEIEIRAEGNSRFTYSVTVDGCTSHTGAWGKTVIEYKTTKTSRLPIIDVAPLDVGAPDQEFGFDVGPVCFL

SEQ ID NO: 1144 - protein, 106 aa, Homo sapiens
MAEVEQKKKRTFRKFTYRGVDLDQLLDMSYEQLMQLYSARQRRRLNRGLRRKQHSLLKRLRKAKKEAPPMEKPETFSSSSYSSSGYGRRYASGSSASLGGPESAVA

SEQ ID NO: 1145 - protein, 106 aa, Homo sapiens; identical to SEQ ID NO: 1144

SEQ ID NO: 1146 - protein, 106 aa, Homo sapiens; identical to SEQ ID NO: 1144

SEQ ID NO: 1147 - protein, 106 aa, Homo sapiens; identical to SEQ ID NO: 1144

SEQ ID NO: 1148 - protein, 106 aa, Homo sapiens; identical to SEQ ID NO: 1144

SEQ ID NO: 1149 - protein, 106 aa, Homo sapiens; identical to SEQ ID NO: 1144

SEQ ID NO: 1150 - protein, 106 aa, Homo sapiens; identical to SEQ ID NO: 1144

SEQ ID NO: 1151 - protein, 106 aa, Homo sapiens; identical to SEQ ID NO: 1144

SEQ ID NO: 1152 - protein, 220 aa, Homo sapiens
MGGAVVDEGPTGVKAPDGGWGWAVLFGCFVITGFSYAFPKAVSVFFKELIQEFGIGYSDTAWISSILLAMLYGTGPLCSVCVNRFGCRPVMLVGGLFASLGMVAASFCRSIIQVYLTTGVITGLGLALNFQPSLIMLNRYFSKRRPMANGLAAAGSPVFLCALSPLGQLLQDRYGWRGGFLILGGLLLNCCVCAALMRPLVVTAQPGSRPPAPPPPRPQA

SEQ ID NO: 1153 - protein, 220 aa, Homo sapiens; identical to SEQ ID NO: 1152

SEQ ID NO: 1154 - protein, 220 aa, Homo sapiens; identical to SEQ ID NO: 1152

SEQ ID NO: 1155 - protein, 3504 aa, Homo sapiens
MSFTTRSTFSTNYRSLGSVQAPSYGARPVSSAASVYAGAGGSGSRISVSRSTSFRGGMGSGGLATGIAGGLAGMGGIQNEKETMQSLNDRLASYLDRVRSLETENRRLESKIREHLEKKGPQVRDWSHYFKIIEDLRAQIFANTVDNARIVLQIDNARLAADDFRVKYETELAMRQSVENDIHGLRKVIDDTNITRLQLETEIEALKEELLFMKKNHEEEVKGLQAQIASSGLTVEVDAPKSQDLAKIMADIRAQYDELARKNREELDKYWSQQIEESTTVVTTQSAEVGAAETTLTELRRTVQSLEIDLDSMRNLKASLENSLRVEKQRQLAEAHAQAKAQAEREAKELQQRMQEEVVRREEAAVDAQQQKRSIQEELQQLRQSSEAEIQAKARQAEAAERSRLRIEEEIRVVRLQLEATERQRGGAEGELQALRARAEEAEAQKRQAQEEAERLRRQVQDESQRKRQAEVELASRVKAEAEAAREKQRALQALEELRLQAEEAERRLRQAEVERARQVQVALETAQRSAEAELQSKRASFAEKTAQLERSLQEEHVAVAQLREEAERRAQQQAEAERAREEAERELERWQLKANEALRLRLQAEEVAQQKSLAQAEAEKQKEEAEREARRRGKAEEQAVRQRELAEQELEKQRQLAEGTAQQRLAAEQELIRLRAETEQGEQQRQLLEEELARLQREAAAATQKRQELEAELAKVRAEMEVLLASKARAEEESRSTSEKSKQRLEAEAGRFRELAEEAARLRALAEEAKRQRQLAEEDAARQRAEAERVLAEKLAAIGEATRLKTEAEIALKEKEAENERLRRLAEDEAFQRRRLEEQAAQHKADIEERLAQLRKASDSELERQKGLVEDTLRQRRQVEEEILALKASFEKAAAGKAELELELGRIRSNAEDTLRSKEQAELEAARQRQLAAEEERRRREAEERVQKSLAAEEEAARQRKAALEEVERLKAKVEEARRLRERAEQESARQLQLAQEAAQKRLQAEEKAHAFAVQQKEQELQQTLQQEQSVLDQLRGEAEAARRAAEEAEEARVQAEREAAQSRRQVEEAERLKQSAEEQAQARAQAQAAAEKLRKEAEQEAARRAQAEQAALRQKQAADAEMEKHKKFAEQTLRQKAQVEQELTTLRLQLEETDHQKNLLDEELQRLKAEATEAARQRSQVEEELFSVRVQMEELSKLKARIEAENRALILRDKDNTQRFLQEEAEKMKQVAEEAARLSVAAQEAARLRQLAEEDLAQQRALAEKMLKEKMQAVQEATRLKAEAELLQQQKELAQEQARRLQEDKEQMAQQLAEETQGFQRTLEAERQRQLEMSAEAERLKLRVAEMSRAQARAEEDAQRFRKQAEEIGEKLHRTELATQEKVTLVQTLEIQRQQSDHDAERLREAIAELEREKEKLQQEAKLLQLKSEEMQTVQQEQLLQETQALQQSFLSEKDSLLQRERFIEQEKAKLEQLFQDEVAKAQQLREEQQRQQQQMEQERQRLVASMEEARRRQHEAEEGVRRKQEELQQLEQQRRQQEELLAEENQRLREQLQLLEEQHRAALAHSEEVTASQVAATKTLPNGRDALDGPAAEAEPEHSFDGLRRKVSAQRLQEAGILSAEELQRLAQGHTTVDELARREDVRHYLQGRSSIAGLLLKATNEKLSVYAALQRQLLSPGTALILLEAQAASGFLLDPVRNRRLTVNEAVKEGVVGPELHHKLLSAERAVTGYKDPYTGQQISLFQAMQKGLIVREHGIRLLEAQIATGGVIDPVHSHRVPVDVAYRRGYFDEEMNRVLADPSDDTKGFFDPNTHENLTYLQLLERCVEDPETGLCLLPLTDKAAKGGELVYTDSEARDVFEKATVSAPFGKFQGKTVTIWEIINSEYFTAEQRRDLLRQFRTGRITVEKIIKIIITVVEEQEQKGRLCFEGLRSLVPAAELLESRVIDRELYQQLQRGERSVRDVAEVDTVRRALRGANVIAGVWLEEAGQKLSIYNALKKDLLPSDMAVALLEAQAGTGHIIDPATSARLTVDEAVRAGLVGPEFHEKLLSAEKAVTGYRDPYTGQSVSLFQALKKGLIPREQGLRLLDAQLSTGGIVDPSKSHRVPLDVACARGCLDEETSRALSAPRADAKAYSDPSTGEPATYGELQQRCRPDQLTGLSLLPLSEKAARARQEELYSELQARETFEKTPVEVPVGGFKGRTVTVWELISSEYFTAEQRQELLRQFRTGKVTVEKVIKILITIVEEVETLRQERLSFSGLRAPVPASELLASGVLSRAQFEQLKDGKTTVKDLSELGSVRTLLQGSGCLAGIYLEDTKEKVSIYEAMRRGLLRATTAALLLEAQAATGFLVDPVRNQRLYVHEAVKAGVVGPELHEQLLSAEKAVTGYRDPYSGSTISLFQAMQKGLVLRQHGIRLLEAQIATGGIIDPVHSHRVPVDVAYQRGYFSEEMNRVLADPSDDTKGFFDPNTHENLTYRQLLERCVEDPETGLRLLPLKGAEKAEVVETTQVYTEEETRRAFEETQIDIPGGGSHGGSTMSLWEVMQSDLIPEEQRAQLMADFQAGRVTKERMIIIIIEIIEKTEIIRQQGLASYDYVRRRLTAEDLFEARIISLETYNLLREGTRSLREALEAESAWCYLYGTGSVAGVYLPGSRQTLSIYQALKKGLLSAEVARLLLEAQAATGFLLDPVKGERLTVDEAVRKGLVGPELHDRLLSAERAVTGYRDPYTEQTISLFQAMKKELIPTEEALRLLDAQLATGGIVDPRLGFHLPLEVAYQRGYLNKDTHDQLSEPSEVRSYVDPSTDERLSYTQLLRRCRRDDGTGQLLLPLSDARKLTFRGLRKQITMEELVRSQVMDEATALQLREGLTSIEEVTKNLQKFLEGTSCIAGVFVDATKERLSVYQAMKKGIIRPGTAFELLEAQAATGYVIDPIKGLKLTVEEAVRMGIVGPEFKDKLLSAERAVTGYKDPYSGKLISLFQAMKKGLILKDHGIRLLEAQIATGGIIDPEESHRLPVEVAYKRGLFDEEMNEILTDPSDDTKGFFDPNTEENLTYLQLMERCITDPQTGLCLLPLKEKKRERKTSSKSSVRKRRVVIVDPETGKEMSVYEAYRKGLIDHQTYLELSEQECEWEEITISSSDGVVKSMIIDRRSGRQYDIDDAIAKNLIDRSALDQYRAGTLSITEFADMLSGNAGGFRSRSSSVGSSSSYPISPAVSRTQLASWSDPTEETGPVAGILDTETLEKVSITEAMHRNLVDNITGQRLLEAQACTGGIIDPSTGERFPVTDAVNKGLVDKIMVDRINLAQKAFCGFEDPRTKTKMSAAQALKKGWLYYEAGQRFLEVQYLTGGLIEPDTPGRVPLDEALQRGTVDARTAQKLRDVGAYSKYLTCPKTKLKISYKDALDRSMVEEGTGLRLLEAAAQSTKGYYSPYSVSGSGSTAGSRTGSRTGSRAGSRRGSFDATGSGFSMTFSSSSYSSSGYGRRYASGSSASLGGPESAVA

SEQ ID NO: 1156 - protein, 3504 aa, Homo sapiens; identical to SEQ ID NO: 1155

SEQ ID NO: 1157 - protein, 3504 aa, Homo sapiens; identical to SEQ ID NO: 1155

SEQ ID NO: 1158 - protein, 3504 aa, Homo sapiens; identical to SEQ ID NO: 1155

SEQ ID NO: 1159 - protein, 3504 aa, Homo sapiens; identical to SEQ ID NO: 1155

SEQ ID NO: 1160 - protein, 3504 aa, Homo sapiens; identical to SEQ ID NO: 1155

SEQ ID NO: 1161 - protein, 3504 aa, Homo sapiens; identical to SEQ ID NO: 1155

SEQ ID NO: 1162 - protein, 3504 aa, Homo sapiens; identical to SEQ ID NO: 1155

SEQ ID NO: 1163 - protein, 3504 aa, Homo sapiens; identical to SEQ ID NO: 1155

SEQ ID NO: 1164 - protein, 3504 aa, Homo sapiens; identical to SEQ ID NO: 1155

SEQ ID NO: 1165 - protein, 3504 aa, Homo sapiens; identical to SEQ ID NO: 1155

SEQ ID NO: 1166 - protein, 3504 aa, Homo sapiens; identical to SEQ ID NO: 1155

SEQ ID NO: 1167 - protein, 3504 aa, Homo sapiens; identical to SEQ ID NO: 1155

SEQ ID NO: 1168 - protein, 3504 aa, Homo sapiens; identical to SEQ ID NO: 1155

SEQ ID NO: 1169 - protein, 3504 aa, Homo sapiens; identical to SEQ ID NO: 1155

SEQ ID NO: 1170 - protein, 3504 aa, Homo sapiens; identical to SEQ ID NO: 1155

SEQ ID NO: 1171 - protein, 180 aa, Homo sapiens
MGLLSDPVRRRALARLVLRLNAPLCVLSYVAGIAWFLALVFPPLTQRTYMSENAMGSTMVEEQFAGGDRARAFARDFAAHRKKSGALPVAWLERTMRSVGLEVYTQSFSRKLPFPDETHERYMVSGTNVYGILRAPRAASTESLVLTVPCGSDSTNSQAVGLLLALAAAGTAPTHADLFQ

SEQ ID NO: 1172 - protein, 225 aa, Homo sapiens
MGLLSDPVRRRALARLVLRLNAPLCVLSYVAGIAWFLALVFPPLTQRTYMSENAMGSTMVEEQFAGGDRARAFARDFAAHRKKSGALPVAWLERTMRSVGLEVYTQSFSRKLPFPDETHERYMVSGTNVYGILRAPRAASTESLVLTVPCGSDSTNSQAVLALLLPTQIYSSETTTGTSSNSSQSTSNTGLAPNPTNATTKAAGGALQSTASLFVVSLSLLHLYS

SEQ ID NO: 1173 - protein, 516 aa, Homo sapiens
MGNRGMEELIPLVNKLQDAFSSIGQSCHLDLPQIAVVGGQSAGKSSVLENFVGRDFLPRGSGIVTRRPLILQLIFSKTEHAEFLHCKSKKFTDFDEVRQEIEAETDRVTGTNKGISPVPINLRVYSPHVLNLTLIDLPGITKVPVGDQPPDIEYQIKDMILQFISRESSLILAVTPANMDLANSDALKLAKEVDPQGLRTIGVITKLDLMDEGTDARDVLENKLLPLRRGYIGVVNRSQKDIEGKKDIRAALAAERKFFLSHPAYRHMADRMGTPHLQKTLNQQLTNHIRESLPALRSKLQSQLLSLEKEVEEYKNFRPDDPTRKTKALLQMVQQFGVDFEKRIEGSGDQVDTLELSGGARINRIFHERFPFELVKMEFDEKDLRREISYAIKNIHGVRTGLFTPDLAFEAIVKKQVVKLKEPCLKCVDLVIQELINTVRQCTSKLSSYPRLREETERIVTTYIREREGRTKDQAECTTSTTSLTPASGSGPAATAAVVAKTGRGSLPGSAARTCW

SEQ ID NO: 1174 - protein, 516 aa, Homo sapiens; identical to SEQ ID NO: 1173

SEQ ID NO: 1175 - protein, 516 aa, Homo sapiens; identical to SEQ ID NO: 1173

SEQ ID NO: 1176 - protein, 516 aa, Homo sapiens
MGNRGMEELIPLVNKLQDAFSSIGQSCHLDLPQIAVVGGQSAGKSSVLENFVGRDFLPRGSGIVTRRPLILQLIFSKTEHAEFLHCKSKKFTDFDEVRQEIEAETDRVTGTNKGISPVPINLRVYSPHVLNLTLIDLPGITKVPVGDQPPDIEYQIKDMILQFISRESSLILAVTPANMDLANSDALKLAKEVDPQGLRTIGVITKLDLMDEGTDARDVLENKLLPLRRGYIGVVNRSQKDIEGKKDIRAALAAERKFFLSHPAYRHMADRMGTPHLQKTLNQQLTNHIRESLPALRSKLQSQLLSLEKEVEEYKNFRPDDPTRKTKALLQMVQQFGVDFEKRIEGSGDQVDTLELSGGARINRIFHERFPFELVKMEFDEKDLRREISYAIKNIHGVRTGLFTPDMAFEAIVKKQIVKLKEPSLKCVDLVVSELATVIKKCAEKLSSYPRLREETERIVTTYIREREGRTKDQAECTTSTTSLTPASGSGPAATAAVVAKTGRGSLPGSAARTCW

SEQ ID NO: 1177 - protein, 516 aa, Homo sapiens; identical to SEQ ID NO: 1176

SEQ ID NO: 1178 - protein, 916 aa, Homo sapiens
MSRQSSVSFRSGGSRSFSTASAITPSVSRTSFTSVSRSGGGGGGGFGRVSLAGACGVGGYGSRSLYNLGGSKRISISTSGGSFRNRFGAGAGGGYGFGGGAGSGFGFGGGAGGGFGLGGGAGFGGGFGGPGFPVCPPGGIQEVTVNQSLLTPLNLQIDPSIQRVRTEEREQIKTLNNKFASFIDKVRFLEQQNKVLDTKWTLLQEQGTKTVRQNLEPLFEQYINNLRRQLDSIVGERGRLDSELRNMQDLVEDFKNKYEDEINKRTTAENEFVMLKKDVDAAYMNKVELEAKVDALMDEINFMKMFFDAELSQMQTHVSDTSVVLSMDNNRNLDLDSIIAEVKAQYEEIANRSRTEAESWYQTKYEELQQTAGRHGDDLRNTKHEISEMNRMIQRLRAEIDNVKKQCANLQNAIADAEQRGELALKDARNKLAELEEALQKAKQDMARLLREYQELMNTKLALDVEIATYRKLLEGEECRLSGEGVGPVNISVVTSSVSSGYGSGSGYGGGGYGGGFSSSSSSFGSGFGGGYGGGLGAGLGGGFGGGFAGGDGLLVGSEKVTMQNLNDRLASYLDKVRALEEANADLEVKIRDWYQRQRPAEIKDYSPYFKTIEDLRNKILTATVDNANVLLQIDNARLAADDFRTKYETELNLRMSVEADINGLRRVLDELTLARADLEMQIESLKEELAYLKKNHEEEMNALRGQVGGDVNVEMDAAPGVDLSRILNEMRDQYEKMAEKNRKDAEEWFFTKTEELNREVATNSELVQSGKSEISELRRTMQNLEIELQSQLSMKASLENSLEETKGRYCMQLAQIQEMIGSVEEQLAQLRCEMEQQNQEYKILLDVKTRLEQEIATYRRLLEGEDAHLSSSQFSSGSQSSRDVTSSSRQIRTKVMDVHDGKVVSTHEQVLRTKN

SEQ ID NO: 1179 - protein, 1310 aa, Homo sapiens
MMSFVQKGSWLLLALLHPTIILAQQEAVEGGCSHLGQSYADRDVWKPEPCQICVCDSGSVLCDDIICDDQELDCPNPEIPFGECCAVCPQPPTAPTRPPNGQGPQGPKGDPGPPGIPGRNGDPGIPGQPGSPGSPGPPGICESCPTGPQNYSPQYDSYDVKSGVAVGGLAGYPGPAGPPGPPGPPGTSGHPGSPGSPGYQGPPGEPGQAGPSGPPGPPGAIGPSGPAGKDGESGRPGRPGERGLPGPPGIKGPAGIPGFPGMKGHRGFDGRNGEKGETGAPGLKGENGLPGENGAPGPMGPRGAPGERGRPGLPGAAGARGNDGARGSDGQPGPPGPPGTAGFPGSPGAKGEVGPAGSPGSNGAPGQRGEPGPQGHAGAQGPPGPPGINGSPGGKGEMGPAGIPGAPGLMGARGPPGPAGANGAPGLRGGAGEPGKNGAKGEPGPRGERGEAGIPGVPGAKGEDGKDGSPGEPGANGLPGAAGERGAPGFRGPAGPNGIPGEKGPAGERGAPGPAGPRGAAGEPGRDGVPGGPGMRGMPGSPGGPGSDGKPGPPGSQGESGRPGPPGPSGPRGQPGVMGFPGPKGNDGAPGKNGERGGPGGPGPQGPPGKNGETGPQGPPGPTGPGGDKGDTGPPGPQGLQGLPGTGGPPGENGKPGEPGPKGDAGAPGAPGGKGDAGAPGERGPPGLAGAPGLRGGAGPPGPEGGKGAAGPPGPPGAAGTPGLQGMPGERGGLGSPGPKGDKGEPGGPGADGVPGKDGPRGPTGPIGPPGPAGQPGDKGEGGAPGLPGIAGPRGSPGERGETGPPGPAGFPGAPGQNGEPGGKGERGAPGEKGEGGPPGVAGPPGGSGPAGPPGPQGVKGERGSPGGPGAAGFPGARGLPGPPGSNGNPGPPGPSGSPGKDGPPGPAGNTGAPGSPGVSGPKGDAGQPGEKGSPGAQGPPGAPGPLGIAGITGARGLAGPPGMPGPRGSPGPQGVKGESGKPGANGLSGERGPPGPQGLPGLAGTAGEPGRDGNPGSDGLPGRDGSPGGKGDRGENGSPGAPGAPGHPGPPGPVGPAGKSGDRGESGPAGPAGAPGPAGSRGAPGPQGPRGDKGETGERGAAGIKGHRGFPGNPGAPGSPGPAGQQGAIGSPGPAGPRGPVGPSGPPGKDGTSGHPGPIGPPGPRGNRGERGSEGSPGHPGQPGPPGPPPDPPDLPDPLASEETLLPSCLMAMMRNQPEEFPCLAPWVPLVLVVSLAPLVHLVPKASKVPLVSLASLELQVPWVPEVPQVPLERMEMMGKLENLVVLVSVGLLGLRVLEDCPEQLASLE

SEQ ID NO: 1180 - protein, 1427 aa, Homo sapiens
MAPYPCGCHILLLLFCCLAAARANLLNLNWLWFNNEDTSHAATTIPEPQGPLPVQPTADTTTHVTPRNGSTEPATAPGSPEPPSELLEDGQDTPTSAESPDAPEENIAGVGAEILNVAKGIRSFVQLWNDTVPTESLARAETLVLETPVGPLALAGPSSTPQENGTTLWPSRGIPSSPGAHTTEAGTLPAPTPSPPSLGRPWAPLTGPSVPPPSSGRASLSSLLGGAPPWGSLQDPDSQGLSPAAAAPSQQLQRPDVRLRTPLLHPLVMGSLGKHAAPSAFSSGLPGALSQVAVTTLTRDSGAWVSHVANSVGPGLANNSALLGADPEAPAGRCLPLPPSLPVCGHLGISRFWLPNHLHHESGEQVRAGARAWGGLLQTHCHPFLAWFFCLLLVPPCGSVPPPAPPPCCQFCEALQDACWSRLGGGRLPVACASLPTQEDGYCVLIGPAAERISEEVGLLQLLGDPPPQQVTQTDDPDVGLAYVFGPDANSGQVARYHFPSLFFRDFSLLFHIRPATEGPGVLFAITDSAQAMVLLGVKLSGVQDGHQDISLLYTEPGAGQTHTAASFRLPAFVGQWTHLALSVAGGFVALYVDCEEFQRMPLARSSRGLELEPGAGLFVAQAGGADPDKFQGVIAELKVRRDPQVSPMHCLDEEGDDSDGASGDSGSGLGDARELLREETGAALKPRLPAPPPVTTPPLAGGSSTEDSRSEEVEEQTTVASLGAQTLPGSDSVSTWDGSVRTPGGRVKEGGLKGQKGEPGVPGPPGRAGPPGSPCLPGPPGLPCPVSPLGPAGPALQTVPGPQGPPGPPGRDGTPGRDGEPGDPGEDGKPGDTGPQGFPGTPGDVGPKGDKGDPGVGERGPPGPQGPPGPPGPSFRHDKLTFIDMEGSGFGGDLEALRGPRGFPGPPGPPGVPGLPGEPGRFGVNSSDVPGPAGLPGVPGREGPPGFPGLPGPPGPPGREGPPGRTGQKGSLGEAGAPGHKGSKGAPGPAGARGESGLAGAPGPAGPPGPPGPPGPPGPGLPAGFDDMEGSGGPFWSTARSADGPQGPPGLPGLKGDPGVPGLPGAKGEVGADGVPGFPGLPGREGIAGPQGPKGDRGSRGEKGDPGKDGVGQPGLPGPPGPPGPVVYVSEQDGSVLSVPGPEGRPGFAGFPGPAGPKGNLGSKGERGSPGPKGEKGEPGSIFSPDGGALGPAQKGAKGEPGFRGPPGPYGRPGYKGEIGFPGRPGRPGMNGLKGEKGEPGDASLGFGMRGMPGPPGPPGPPGPPGTPVYDSNVFAESSRPGPPGLPGNQGPPGPKGAKGEVGPPGPPGQFPFDFLQLEAEMKGEKGDRGDAGQKGERGEPGGGGFFGSSLPGPPGPPGPRGYPGIPGPKGESIRGQPGPPGPQGPPGIGYEGRQGPFAWPGGPWQPLSKKPCLMRQRWWKKLWQR

SEQ ID NO: 1181 - protein, 1012 aa, Homo sapiens
MAPRCPWPWPRRRRLLDVLAPLVLLLGVRAASAEPERISEEVGLLQLLGDPPPQQVTQTDDPDVGLAYVFGPDANSGQVARYHFPSLFFRDFSLLFHIRPATEGPGVLFAITDSAQAMVLLGVKLSGVQDGHQDISLLYTEPGAGQTHTAASFRLPAFVGQWTHLALSVAGGFVALYVDCEEFQRMPLARSSRGLELEPGAGLFVAQAGGADPDKFQGVIAELKVRRDPQVSPMHCLDEEGDDSDGASGDSGSGLGDARELLREETGAALKPRLPAPPPVTTPPLAGGSSTEDSRSEEVEEQTTVASLGAQTLPGSDSVSTWDGSVRTPGGRVKEGGLKGQKGEPGVPGPPGRAGPPGSPCLPGPPGLPCPVSPLGPAGPALQTVPGPQGPPGPPGRDGTPGRDGEPGDPGEDGKPGDTGPQGFPGTPGDVGPKGDKGDPGVGERGPPGPQGPPGPPGPSFRHDKLTFIDMEGSGFGGDLEALRGPRGFPGPPGPPGVPGLPGEPGRFGVNSSDVPGPAGLPGVPGREGPPGFPGLPGPPGPPGREGPPGRTGQKGSLGEAGAPGHKGSKGAPGPAGARGESGLAGAPGPAGPPGPPGPPGPPGPGLPAGFDDMEGSGGPFWSTARSADGPQGPPGLPGLKGDPGVPGLPGAKGEVGADGVPGFPGLPGREGIAGPQGPKGDRGSRGEKGDPGKDGVGQPGLPGPPGPPGPVVYVSEQDGSVLSVPGPEGRPGFAGFPGPAGPKGNLGSKGERGSPGPKGEKGEPGSIFSPDGGALGPAQKGAKGEPGFRGPPGPYGRPGYKGEIGFPGRPGRPGMNGLKGEKGEPGDASLGFGMRGMPGPPGPPGPPGPPGTPVYDSNVFAESSRPGPPGLPGNQGPPGPKGAKGEVGPPGPPGQFPFDFLQLEAEMKGEKGDRGDAGQKGERGEPGGGGFFGSSLPGPPGPPGPRGYPGIPGPKGESIRGQPGPPGPQGPPGIGYEGRQGPFAWPGGPWQPLSKKPCLMRQRWWKKLWQR

SEQ ID NO: 1182 - protein, 1192 aa, Homo sapiens
MAPYPCGCHILLLLFCCLAAARANLLNLNWLWFNNEDTSHAATTIPEPQGPLPVQPTADTTTHVTPRNGSTEPATAPGSPEPPSELLEDGQDTPTSAESPDAPEENIAGVGAEILNVAKGIRSFVQLWNDTVPTESLARAETLVLETPVGPLALAGPSSTPQENGTTLWPSRGIPSSPGAHTTEAGTLPAPTPSPPSLGRPWAPLTGPSVPPPSSERISEEVGLLQLLGDPPPQQVTQTDDPDVGLAYVFGPDANSGQVARYHFPSLFFRDFSLLFHIRPATEGPGVLFAITDSAQAMVLLGVKLSGVQDGHQDISLLYTEPGAGQTHTAASFRLPAFVGQWTHLALSVAGGFVALYVDCEEFQRMPLARSSRGLELEPGAGLFVAQAGGADPDKFQGVIAELKVRRDPQVSPMHCLDEEGDDSDGASGDSGSGLGDARELLREETGAALKPRLPAPPPVTTPPLAGGSSTEDSRSEEVEEQTTVASLGAQTLPGSDSVSTWDGSVRTPGGRVKEGGLKGQKGEPGVPGPPGRAGPPGSPCLPGPPGLPCPVSPLGPAGPALQTVPGPQGPPGPPGRDGTPGRDGEPGDPGEDGKPGDTGPQGFPGTPGDVGPKGDKGDPGVGERGPPGPQGPPGPPGPSFRHDKLTFIDMEGSGFGGDLEALRGPRGFPGPPGPPGVPGLPGEPGRFGVNSSDVPGPAGLPGVPGREGPPGFPGLPGPPGPPGREGPPGRTGQKGSLGEAGAPGHKGSKGAPGPAGARGESGLAGAPGPAGPPGPPGPPGPPGPGLPAGFDDMEGSGGPFWSTARSADGPQGPPGLPGLKGDPGVPGLPGAKGEVGADGVPGFPGLPGREGIAGPQGPKGDRGSRGEKGDPGKDGVGQPGLPGPPGPPGPVVYVSEQDGSVLSVPGPEGRPGFAGFPGPAGPKGNLGSKGERGSPGPKGEKGEPGSIFSPDGGALGPAQKGAKGEPGFRGPPGPYGRPGYKGEIGFPGRPGRPGMNGLKGEKGEPGDASLGFGMRGMPGPPGPPGPPGPPGTPVYDSNVFAESSRPGPPGLPGNQGPPGPKGAKGEVGPPGPPGQFPFDFLQLEAEMKGEKGDRGDAGQKGERGEPGGGGFFGSSLPGPPGPPGPRGYPGIPGPKGESIRGQPGPPGPQGPPGIGYEGRQGPFAWPGGPWQPLSKKPCLMRQRWWKKLWQR

SEQ ID NO: 1183 - protein, 362 aa, Homo sapiens
MRAWIFFLPPGPPGPPGPPSFPGPHRQTISVPGPPGPPGPPGPPGTMGASSGVRLWATRQAMLGQVHEVPEGWLIFVAEQEELYVRVQNGFRKVQLEARTPLPRGTDNEVAALQPPVVQLHDSNPYPRREHPHPTARPWRADDILASPPRLPEPQPYPGAPHHSSYVHLRPARPTSPPAHSHRDFQPVLHLVALNSPLSGGMRGIRGADFQCFQQARAVGLAGTFRAFLSSRLQDLYSIVRRADRAAVPIVNLKDELLFPSWEALFSGSEGPLKPGARIFSFDGKDVLRHPTWPQKSVWHGSDPNGRRLTESYCETWRTEAPSATGQASSLLGGRLLGQSAASCHHAYIVLCIENSFMTASK

SEQ ID NO: 1184 - protein, 362 aa, Homo sapiens; identical to SEQ ID NO: 1183

SEQ ID NO: 1185 - protein, 362 aa, Homo sapiens; identical to SEQ ID NO: 1183

SEQ ID NO: 1186 - protein, 1427 aa, Homo sapiens; identical to SEQ ID NO: 1180

SEQ ID NO: 1187 - protein, 1012 aa, Homo sapiens; identical to SEQ ID NO: 1181

SEQ ID NO: 1188 - protein, 1192 aa, Homo sapiens; identical to SEQ ID NO: 1182

SEQ ID NO: 1189 - protein, 1427 aa, Homo sapiens; identical to SEQ ID NO: 1180

SEQ ID NO: 1190 - protein, 1012 aa, Homo sapiens; identical to SEQ ID NO: 1181

SEQ ID NO: 1191 - protein, 1192 aa, Homo sapiens; identical to SEQ ID NO: 1182

SEQ ID NO: 1192 - protein, 413 aa, Homo sapiens
MADGVDHIDIYADVGEEFNQEAEYGGHDQIDLYDDVISPSANNGDAPEDRDYMDTLPPTVGDDVGKGAAPNVVYTYTGKRIALYIGNLTWWTTDEDLTEAVHSLGVNDILEIKFFENRANGQSKGFALVGVGSEASSKKLMDLLPKRELHGQNPVVTPCNKQFLSQFEMQSRKTTQSGQMSGEGKAGPPGGSSRAAFPQGGRGRGRFPGAVPGGDRFPGPAGPGGPVKLVPLVPLALLARKDPLVLMVLLVLLVLPGLKVLLDSVVWSACLVREEREASLVFLAPLVNLANKVPLEQVVNVVPLVPWAPLDWLDPLVNLDVRGLLVPKVPLDETVLLAPRVTVVRPAPLDPLVLLVLLVPLAPLALLARVVIVVRLVLLVPPVLSALLAPVAPPDPKAPVVTRVRQANRATEA

SEQ ID NO: 1193 - protein, 413 aa, Homo sapiens; identical to SEQ ID NO: 1192

SEQ ID NO: 1194 - protein, 256 aa, Homo sapiens
MCSGSGRRRSSLSPTMRPGTGAERGGLMMGHPGMHYAPMGMHPMGQRANMPPVPHGMMPQMMPPMGGPPMGQMPGMMSSVMPGMMMSHMSQASMQPALPPGVNSMDVAAGTASGAKSMWTEHKSPDGRTYYYNTETKQSTWEKPDDLKTPAEQLLSKCPWKEYKSDSGKPYYYNSQTKESRWAKPKELEDLEGYQNTIVAGSLITKSNLHAMIKAEESSKQEECTTTSTAPVPTTEIPTTMSTMAAAEAAAAGCCC

SEQ ID NO: 1195 - protein, 256 aa, Homo sapiens; identical to SEQ ID NO: 1194

SEQ ID NO: 1196 - protein, 503 aa, Homo sapiens
MDLMNGQASSVNIAATASEKSSSSESLSDKGSELKKSFDAVVFDVLKVTPEEYAGQITLMDVPVFKAIQPDELSSCGWNKKEKYSSAPNAVAFTRRFNHVSFWVVREILHAQTLKIRAEVLSHYIKTAKKLYELNNLHALMAVVSGLQSAPIFRLTKTWALLSRKDKTTFEKLEYVMSKEDNYKRLRDYISSLKMTPCIPYLGIYLSDLTYIDSAYPSTGSILENEQRSNLMNNILRIISDLQQSCEYDIPMLPHVQKYLNSVQYIEELQKFVEDDNYKLSLKIEPGTSTPRSAASREDLVGPEVGASPQSGRKSVAAEGALLPQTPPSPRNLIPHGHRKCHSLGYNFIHKMNTAEFKSATFPNAGPRHLLDDSVMEPHAPSRGQAESSTLSSGISIGSSDGSELSEETSWPAFERNRLYHSLGPVTRVARNGYRSHMKASSSAESEDLAVHLYPGAVTIQGVLRRKTLLKEGKKPTPVTVISGEQRARAATRHQAAASAALA

SEQ ID NO: 1197 - protein, 503 aa, Homo sapiens; identical to SEQ ID NO: 1196

SEQ ID NO: 1198 - protein, 503 aa, Homo sapiens; identical to SEQ ID NO: 1196

SEQ ID NO: 1199 - protein, 1291 aa, Homo sapiens
MFSFVDLRLLLLLAATALLTHGQEEGQVEGQDEDIPPITCVQNGLRYHDRDVWKPEPCRICVCDNGKVLCDDVICDETKNCPGAEVPEGECCPVCPDGSESPTDQETTGVEGPKGDTGPRGPRGPAGPPGRDGIPGQPGLPGPPGPPGPPGPPGLGGNFAPQLSYGYDEKSTGGISVPGPMGPSGPRGLPGPPGAPGPQGFQGPPGEPGEPGASGPMGPRGPPGPPGKNGDDGEAGKPGRPGERGPPGPQGARGLPGTAGLPGMKGHRGFSGLDGAKGDAGPAGPKGEPGSPGENGAPGQMGPRGLPGERGRPGAPGPAGARGNDGATGAAGPPGPTGPAGPPGFPGAVGAKGEAGPQGPRGSEGPQGVRGEPGPPGPAGAAGPAGNPGADGQPGAKGANGAPGIAGAPGFPGARGPSGPQGPGGPPGPKGNSGEPGAPGSKGDTGAKGEPGPVGVQGPPGPAGEEGKRGARGEPGPTGLPGPPGERGGPGSRGFPGADGVAGPKGPAGERGSPGPAGPKGSPGEAGRPGEAGLPGAKGLTGSPGSPGPDGKTGPPGPAGQDGRPGPPGPPGARGQAGVMGFPGPKGAAGEPGKAGERGVPGPPGAVGPAGKDGEAGAQGPPGPAGPAGERGEQGPAGSPGFQGLPGPAGPPGEAGKPGEQGVPGDLGAPGPSGARGERGFPGERGVQGPPGPAGPRGANGAPGNDGAKGDAGAPGAPGSQGAPGLQGMPGERGAAGLPGPKGDRGDAGPKGADGSPGKDGVRGLTGPIGPPGPAGAPGDKGESGPSGPAGPTGARGAPGDRGEPGPPGPAGFAGPPGADGQPGAKGEPGDAGAKGDAGPPGPAGPAGPPGPIGNVGAPGAKGARGSAGPPGATGFPGAAGRVGPPGPSGNAGPPGPPGPAGKEGGKGPRGETGPAGRPGEVGPPGPPGPAGEKGSPGADGPAGAPGTPGPQGIAGQRGVVGLPGQRGERGFPGLPGPSGEPGKQGPSGASGERGPPGPMGPPGLAGPPGESGREGAPGAEGSPGRDGSPGAKGDRGETGPAGPPGAPGAPGAPGPVGPAGKSGDRGETGPAGPTGPVGPVGARGPAGPQGPRGDKGETGEQGDRGIKGHRGFSGLQGPPGPPGSPGEQGPSGASGPAGPRGPPGSAGAPGKDGLNGLPGPIGPPGPRGRTGDAGPVGPPGPPGPPGPPGPPSAGFDFSFLPQPPQEKAHDGGRYYRADDANVVRDRDLEVDTTLKSLSQQIENIRSPEGSRKNPARTCRDLKMCHSDWKSGLHSSRRFSLASRAARLRAA

SEQ ID NO: 1200 - protein, 695 aa, Homo sapiens
MPEEVHHGEEEVETFAFQAEIAQLMSLIINTFYSNKEIFLRELISNASDALDKIRYESLTDPSKLDSGKELKIDIIPNPQERTLTLVDTGIGMTKADLINNLGTIAKSGTKAFMEALQAGADISMIGQFGVGFYSAYLVAEKVVVITKHNDDEQYAWESSAGGSFTVRADHGEPIGRGTKVILHLKEDQTEYLEERRVKEVVKKHSQFIGYPITLYLEKEREKEISDDEAEEEKGEKEEEDKDDEEKPKIEDVGSDEEDDSGKDKKKKTKKIKEKYIDQEELNKTKPIWTRNPDDITQEEYGEFYKSLTNDWEDHLAVKHFSVEGQLEFRALLFIPRRAPFDLFENKKKKNNIKLYVRRVFIMDSCDELIPEYLNFIRGVVDSEDLPLNISREMLQQSKILKVIRKNIVKKCLELFSELAEDKENYKKFYEAFSKNLKLGIHEDSTNRRRLSELLRYHTSQSGDEMTSLSEYVSRMKETQKSIYYITGESKEQVANSAFVERVRKRGFEVVYMTEPIDEYCVQQLKEFDGKSLVSVTKEGLELPEDEEEKKKMEESKAKFENLCKLMKEILDKKVEKVTISNRLVSSPCCIVTSTYEGTNTSGASECESVSDKAPSPATLPATSSSLPSPATPSHGSPSSHGPPATHPTSPTPPSTASGATTAANGGSLNCLQTPSSTSRGRKMTVNGAPVPPLT

SEQ ID NO: 1201 - protein, 49 aa, Homo sapiens
MADDAGAAGGPGGPGGPGMGNRGGFRGGFGSGIRGRGRGRGRGVGQETL

SEQ ID NO: 1202 - protein, 49 aa, Homo sapiens; identical to SEQ ID NO: 1201

SEQ ID NO: 1203 - protein, 49 aa, Homo sapiens; identical to SEQ ID NO: 1201

SEQ ID NO: 1204 - protein, 15 aa, Homo sapiens
FFFFFKCPFHYETLF

SEQ ID NO: 1205 - protein, 15 aa, Homo sapiens
FFFFFKCPFHYETLF

SEQ ID NO: 1206 - protein, 15 aa, Homo sapiens
FFFFFKCPFHYETLF

SEQ ID NO: 1207 - protein, 398 aa, Homo sapiens
MTTCSRQFTSSSSMKGSCGIGGGIGGGSSRISSVLAGGSCRAPSTYGGGLSVSSSRFSSGGACGLGGGYGGGFSSSSSSFGSGFGGGYGGGLGAGLGGGFGGGFAGGDGLLVGSEKVTMQNLNDRLASYLDKVRALEEANADLEVKIRDWYQRQRPAEIKDYSPYFKTIEDLRNKILTATVDNANVLLQIDNARLAADDFRTKYETELNLRMSVEADINGLRRVLDELTLARADLEMQIESLKEELAYLKKNHEEEMNALRGQVGGDVNVEMDAAPGVDLSRILNEMRDQYEKMAEKNRKDAEEWFFTKTEELNREVATNSELVQSGKSEISELRRTMQNLEIELQSQLSMKASLENSLEETKGRYCMQLAQIQEMIGSVLGQLLLPTSLLGLYQQPV

SEQ ID NO: 1208 - protein, 141 aa, Homo sapiens
MASELEPEVQAIDRSLLECSAEEIAGAFELATGDYLFEPHSGEEYTRDEDHIALIIELLGKVPRKLIVAGKYSKEFFTKKGDLKHITKLKPWGLFEVLVEKYEWSQEEAAGFTDFLLPMLELIPEKRATAAECLRHPWLNS

SEQ ID NO: 1209 - protein, 141 aa, Homo sapiens; identical to SEQ ID NO: 1208

SEQ ID NO: 1210 - protein, 141 aa, Homo sapiens; identical to SEQ ID NO: 1208

SEQ ID NO: 1211 - protein, 141 aa, Homo sapiens; identical to SEQ ID NO: 1208

SEQ ID NO: 1212 - protein, 152 aa, Homo sapiens
MADKPDMGEIASFDKAKLKKTETQEKNTLPTKETNGLIKVNGRPLEMIEPRTLQYKLLEPVLLLGKERFAGVDIRVRVKGGGHVAQIYAIRQSISKALVAYYQKYVDEASKKEIKDILIQYDRTLLVADPRRCESKKFGGPGARARYQKSYR

SEQ ID NO: 1213 - protein, 643 aa, Homo sapiens
MSALASRSAPAMQSSGSFNYARPKQFIAAQNLGPASGHGTPASSPSSSSLPSPMSPTPRQFGRAPVPPFAQPFGAEPEAPWGSSSPSPPPPPPPGGGGFGRVSLAGACGVGGYGSRSLYNLGGSKRISISTSGGSFRNRFGAGAGGGYGFGGGAGSGFGFGGGAGGGFGLGGGAGFGGGFGGPGFPVCPPGGIQEVTVNQSLLTPLNLQIDPSIQRVRTEEREQIKTLNNKFASFIDKVRFLEQQNKVLDTKWTLLQEQGTKTVRQNLEPLFEQYINNLRRQLDSIVGERGRLDSELRNMQDLVEDFKNKYEDEINKRTTAENEFVMLKKDVDAAYMNKVELEAKVDALMDEINFMKMFFDAELSQMQTHVSDTSVVLSMDNNRNLDLDSIIAEVKAQYEEIANRSRTEAESWYQTKYEELQQTAGRHGDDLRNTKHEISEMNRMIQRLRAEIDNVKKQCANLQNAIADAEQRGELALKDARNKLAELEEALQKAKQDMARLLREYQELMNTKLALDVEIATYRKLLEGEECRLSGEGVGPVNISVVTSSVSSGYGSGSGYGGGLGGGLGGGLGGGLAGGSSGSYYSSSSGGVGLGGGLSVGGSGFSASSGRGLGVGFGSGGGSSSSVKFVSTTSSSRKSFKS

SEQ ID NO: 1214 - protein, 643 aa, Homo sapiens; identical to SEQ ID NO: 1213

SEQ ID NO: 1215 - protein, 810 aa, Homo sapiens
MAAVRGAPLLSCLLALLALCPGGRPQTVLTDDEIEEFLEGFLSELEPEPREDDVEAPPPPEPTPRVRKAQAGGKPGKRPGTAAEVPPEKTKDKGKKGKKDKGPKVPKESLEGSPRPPKKGKEKPPKATKKPKEKPPKATKKPKEKPPKATKKPKEKPPKATKKPPSGKRPPILAPSETLEWPLPPPPSPGPEELPQEGGAPLSNNWQNPGEETHVEAREHQPEPEEETEQPTLDYNDQIEREDYEDFEYIRRQKQPRPPPSRRRRPERVWPEPPEEKAPAPAPEERIEPPVKPLLPPLPPDYGDGYVIPNYDDMDYYFGPPPPQKPDAERQTDEEKEELKKPKKEDSSPKEETDKWAVEKGKDHKEPRKGEELEEEWTPTEKVKCPPIGMESHRIEDNQIRASSMLRHGLGAQRGRLNMQTGATEDDYYDGAWCAEDDARTQWIEVDTRRTTRFTGVITQGRDSSIHDDFVTTFFVGFSNDSQTWVMYTNGYEEMTFHGNVDKDTPVLSELPEPVVARFIRIYPLTWNGSLCMRLEVLGCSVAPVYSYYAQNEVVATDDLDFRHHSYKDMRQLMKVVNEECPTITRTYSLGKSSRGLKIYAMEISDNPGEHELGEPEFRYTAGIHGNEVLGRELLLLLMQYLCREYRDGNPRVRSLVQDTRIHLVPSLNPDGYEVAAQMGSEFGNWALGLWTEEGFDIFEDFPDLNSVLWGAEERKWVPYRVPNNNLPIPERYLSPDATVSTEVRAIIAWMEKNPFVLGANLNGGERLVSYPYDMAPPRPPRAHSHSHPGAGGGRPGPHRPPMDAPSTGR

SEQ ID NO: 1216 - protein, 810 aa, Homo sapiens; identical to SEQ ID NO: 1215

SEQ ID NO: 1217 - protein, 810 aa, Homo sapiens; identical to SEQ ID NO: 1215

SEQ ID NO: 1218 - protein, 2529 aa, Homo sapiens
MSSSHSRAGQSAAGAAPGGGVDTRDAEMPATEKDLAEDAPWKKIQQNTFTRWCNEHLKCVSKRIANLQTDLSDGLRLIALLEVLSQKKMHRKHNQRPTFRQMQLENVSVALEFLDRESIKLVSIDSKAIVDGNLKLILGLIWTLILHYSISMPMWDEEEDEEAKKQTPKQRLLGWIQNKLPQLPITNFSRDWQSGRALGALVDSCAPGLCPDWDSWDASKPVTNAREAMQQADDWLGIPQVITPEEIVDPNVDEHSVMTYLSQFPKAKLKPGAPLRPKLNPKKARAYGPGIEPTGNMVKKRAEFTVETRSAGQGEVLVYVEDPAGHQEEAKVTANNDKNRTFSVWYVPEVTGTHKVTVLFAGQHIAKSPFEVYVDKSQGDASKVTAQGPGLEPSGNIANKTTYFEIFTAGAGTGEVEVVIQDPMGQKGTVEPQLEARGDSTYRCSYQPTMEGVHTVHVTFAGVPIPRSPYTVTVGQACNPSACRAVGRGLQPKGVRVKETADFKVYTKGAGSGELKVTVKGPKGEERVKQKDLGDGVYGFEYYPMVPGTYIVTITWGGQNIGRSPFEVKVGTECGNQKVRAWGPGLEGGVVGKSADFVVEAIGDDVGTLGFSVEGPSQAKIECDDKGDGSCDVRYWPQEAGEYAVHVLCNSEDIRLSPFMADIRDAPQDFHPDRVKARGPGLEKTGVAVNKPAEFTVDAKHGGKAPLRVQVQDNEGCPVEALVKDNGNGTYSCSYVPRKPVKHTAMVSWGGVSIPNSPFRVNVGAGSHPNKVKVYGPGVAKTGLKAHEPTYFTVDCAEAGQGDVSIGIKCAPGVVGPAEADIDFDIIRNDNDTFTVKYTPRGAGSYTIMVLFADQATPTSPIRVKVEPSHDASKVKAEGPGLSRTGVELGKPTHFTVNAKAAGKGKLDVQFSGLTKGDAVRDVDIIDHHDNTYTVKYTPVQQGPVGVNVTYGGDPIPKSPFSVAVSPSLDLSKIKVSGLGEKVDVGKDQEFTVKSKGAGGQGKVASKIVGPSGAAVPCKVEPGLGADNSVVRFLPREEGPYEVEVTYDGVPVPGSPFPLEAVAPTKPSKVKAFGPGLQGGSAGSPARFTIDTKGAGTGGLGLTVEGPCEAQLECLDNGDGTCSVSYVPTEPGDYNINILFADTHIPGSPFKAHVVPCFDASKVKCSGPGLERATAGEVGQFQVDCSSAGSAELTIEICSEAGLPAEVYIQDHGDGTHTITYIPLCPGAYTVTIKYGGQPVPNFPSKLQVEPAVDTSGVQCYGPGIEGQGVFREATTEFSVDARALTQTGGPHVKARVANPSGNLTETYVQDRGDGMYKVEYTPYEEGLHSVDVTYDGSPVPSSPFQVPVTEGCDPSRVRVHGPGIQSGTTNKPNKFTVETRGAGTGGLGLAVEGPSEAKMSCMDNKDGSCSVEYIPYEAGTYSLNVTYGGHQVPGSPFKVPVHDVTDASKVKCSGPGLSPGMVRANLPQSFQVDTSKAGVAPLQVKVQGPKGLVEPVDVVDNADGTQTVNYVPSREGPYSISVLYGDEEVPRSPFKVKVLPTHDASKVKASGPGLNTTGVPASLPVEFTIDAKDAGEGLLAVQITDPEGKPKKTHIQDNHDGTYTVAYVPDVTGRYTILIKYGGDEIPFSPYRVRAVPTGDASKCTVTVSIGGHGLGAGIGPTIQIGEETVITVDTKAAGKGKVTCTVCTPDGSEVDVDVVENEDGTFDIFYTAPQPGKYVICVRFGGEHVPNSPFQVTALAGDQPSVQPPLRSQQLAPQYTYAQGGQQTWAPERPLVGVNGLDVTSLRPFDLVIPFTIKKGEITGEVRMPSGKVAQPTITDNKDGTVTVRYAPSEAGLHEMDIRYDNMHIPGSPLQFYVDYVNCGHVTAYGPGLTHGVVNKPATFTVNTKDAGEGGLSLAIEGPSKAEISCTDNQDGTCSVSYLPVLPGDYSILVKYNEQHVPGSPFTARVTGDDSMRMSHLKVGSAADIPINISETDLSLLTATVVPPSGREEPCLLKRLRNGHVGISFVPKETGEHLVHVKKNGQHVASSPIPVVISQSEIGDASRVRVSGQGLHEGHTFEPAEFIIDTRDAGYGGLSLSIEGPSKVDINTEDLEDGTCRVTYCPTEPGNYIINIKFADQHVPGSPFSVKVTGEGRVKESITRRRRAPSVANVGSHCDLSLKIPEISIQDMTAQVTSPSGKTHEAEIVEGENHTYCIRFVPAEMGTHTVSVKYKGQHVPGSPFQFTVGPLGEGGAHKVRAGGPGLERAEAGVPAEFSIWTREAGAGGLAIAVEGPSKAEISFEDRKDGSCGVAYVVQEPGDYEVSVKFNEEHIPDSPFVVPVASPSGDARRLTVSSLQESGLKVNQPASFAVSLNGAKGAIDAKVHSPSGALEECYVTEIDQDKYAVRFIPRENGVYLIDVKFNGTHIPGSPFKIRVGEPGHGGDPGLVSAYGAGLEGGVTGNPAEFVVNTSNAGAGALSVTIDGPSKVKMDCQECPEGYRVTYTPMAPARAWSGGSGPRGFWSSSPCTRPCPVVTAVAAPNCAKG

SEQ ID NO: 1219 - protein, 2529 aa, Homo sapiens; identical to SEQ ID NO: 1218

SEQ ID NO: 1220 - protein, 2521 aa, Homo sapiens
MSSSHSRAGQSAAGAAPGGGVDTRDAEMPATEKDLAEDAPWKKIQQNTFTRWCNEHLKCVSKRIANLQTDLSDGLRLIALLEVLSQKKMHRKHNQRPTFRQMQLENVSVALEFLDRESIKLVSIDSKAIVDGNLKLILGLIWTLILHYSISMPMWDEEEDEEAKKQTPKQRLLGWIQNKLPQLPITNFSRDWQSGRALGALVDSCAPGLCPDWDSWDASKPVTNAREAMQQADDWLGIPQVITPEEIVDPNVDEHSVMTYLSQFPKAKLKPGAPLRPKLNPKKARAYGPGIEPTGNMVKKRAEFTVETRSAGQGEVLVYVEDPAGHQEEAKVTANNDKNRTFSVWYVPEVTGTHKVTVLFAGQHIAKSPFEVYVDKSQGDASKVTAQGPGLEPSGNIANKTTYFEIFTAGAGTGEVEVVIQDPMGQKGTVEPQLEARGDSTYRCSYQPTMEGVHTVHVTFAGVPIPRSPYTVTVGQACNPSACRAVGRGLQPKGVRVKETADFKVYTKGAGSGELKVTVKGPKGEERVKQKDLGDGVYGFEYYPMVPGTYIVTITWGGQNIGRSPFEVKVGTECGNQKVRAWGPGLEGGVVGKSADFVVEAIGDDVGTLGFSVEGPSQAKIECDDKGDGSCDVRYWPQEAGEYAVHVLCNSEDIRLSPFMADIRDAPQDFHPDRVKARGPGLEKTGVAVNKPAEFTVDAKHGGKAPLRVQVQDNEGCPVEALVKDNGNGTYSCSYVPRKPVKHTAMVSWGGVSIPNSPFRVNVGAGSHPNKVKVYGPGVAKTGLKAHEPTYFTVDCAEAGQGDVSIGIKCAPGVVGPAEADIDFDIIRNDNDTFTVKYTPRGAGSYTIMVLFADQATPTSPIRVKVEPSHDASKVKAEGPGLSRTGVELGKPTHFTVNAKAAGKGKLDVQFSGLTKGDAVRDVDIIDHHDNTYTVKYTPVQQGPVGVNVTYGGDPIPKSPFSVAVSPSLDLSKIKVSGLGEKVDVGKDQEFTVKSKGAGGQGKVASKIVGPSGAAVPCKVEPGLGADNSVVRFLPREEGPYEVEVTYDGVPVPGSPFPLEAVAPTKPSKVKAFGPGLQGGSAGSPARFTIDTKGAGTGGLGLTVEGPCEAQLECLDNGDGTCSVSYVPTEPGDYNINILFADTHIPGSPFKAHVVPCFDASKVKCSGPGLERATAGEVGQFQVDCSSAGSAELTIEICSEAGLPAEVYIQDHGDGTHTITYIPLCPGAYTVTIKYGGQPVPNFPSKLQVEPAVDTSGVQCYGPGIEGQGVFREATTEFSVDARALTQTGGPHVKARVANPSGNLTETYVQDRGDGMYKVEYTPYEEGLHSVDVTYDGSPVPSSPFQVPVTEGCDPSRVRVHGPGIQSGTTNKPNKFTVETRGAGTGGLGLAVEGPSEAKMSCMDNKDGSCSVEYIPYEAGTYSLNVTYGGHQVPGSPFKVPVHDVTDASKVKCSGPGLSPGMVRANLPQSFQVDTSKAGVAPLQVKVQGPKGLVEPVDVVDNADGTQTVNYVPSREGPYSISVLYGDEEVPRSPFKVKVLPTHDASKVKASGPGLNTTGVPASLPVEFTIDAKDAGEGLLAVQITDPEGKPKKTHIQDNHDGTYTVAYVPDVTGRYTILIKYGGDEIPFSPYRVRAVPTGDASKCTVTGAGIGPTIQIGEETVITVDTKAAGKGKVTCTVCTPDGSEVDVDVVENEDGTFDIFYTAPQPGKYVICVRFGGEHVPNSPFQVTALAGDQPSVQPPLRSQQLAPQYTYAQGGQQTWAPERPLVGVNGLDVTSLRPFDLVIPFTIKKGEITGEVRMPSGKVAQPTITDNKDGTVTVRYAPSEAGLHEMDIRYDNMHIPGSPLQFYVDYVNCGHVTAYGPGLTHGVVNKPATFTVNTKDAGEGGLSLAIEGPSKAEISCTDNQDGTCSVSYLPVLPGDYSILVKYNEQHVPGSPFTARVTGDDSMRMSHLKVGSAADIPINISETDLSLLTATVVPPSGREEPCLLKRLRNGHVGISFVPKETGEHLVHVKKNGQHVASSPIPVVISQSEIGDASRVRVSGQGLHEGHTFEPAEFIIDTRDAGYGGLSLSIEGPSKVDINTEDLEDGTCRVTYCPTEPGNYIINIKFADQHVPGSPFSVKVTGEGRVKESITRRRRAPSVANVGSHCDLSLKIPEISIQDMTAQVTSPSGKTHEAEIVEGENHTYCIRFVPAEMGTHTVSVKYKGQHVPGSPFQFTVGPLGEGGAHKVRAGGPGLERAEAGVPAEFSIWTREAGAGGLAIAVEGPSKAEISFEDRKDGSCGVAYVVQEPGDYEVSVKFNEEHIPDSPFVVPVASPSGDARRLTVSSLQESGLKVNQPASFAVSLNGAKGAIDAKVHSPSGALEECYVTEIDQDKYAVRFIPRENGVYLIDVKFNGTHIPGSPFKIRVGEPGHGGDPGLVSAYGAGLEGGVTGNPAEFVVNTSNAGAGALSVTIDGPSKVKMDCQECPEGYRVTYTPMAPARAWSGGSGPRGFWSSSPCTRPCPVVTAVAAPNCAKG

SEQ ID NO: 1221 - protein, 2521 aa, Homo sapiens; identical to SEQ ID NO: 1220

SEQ ID NO: 1222 - protein, 76 aa, Homo sapiens
IRDHKRPAGPDVLRRESSGFPASTVLGRNPALVPHPGRPPIASPPSPLHRTLGLPQGPRRRSSAAQPRRRRRRRAV

SEQ ID NO: 1223 - protein, 655 aa, Homo sapiens
MMSFVQKGSWLLLALLHPTIILAQQEAVEGGCSHLGQSYADRDVWKPEPCQICVCDSGSVLCDDIICDDQELDCPNPEIPFGECCAVCPQPPTAPTRPPNGQGPQGPKGDPGPPGIPGRNGDPGIPGQPGSPGSPGPPGICESCPTGPQNYSPQYDSYDVKSGVAVGGLAGYPGPAGLPGPPGPAGPRGERGPQGNSGEKGDQGFQGQPGFPGPPGPPGFPGKVGSPGPPGPQAEKGSEGIRGPSGLPGSPGPPGPPGIQGPAGLDGLDGKDGKPGLRGDPGPAGPPGLMGPPGFKGKTGHPGLPGPKGDCGKPGPPGSTGRPGAEGEPGAMGPQGRPGPPGHVGPPGPPGQPGPAGISAVGLKGDRGATGERGLAGLPGQPGPPGHPGPPGEPGTDGAAGKEGPPGKQGFYGPPGPKGDPGAAGQKGQAGEKGRAGMPGGPGKSGSMGPVGPPGPAGERGHPGAPGPSGSPGLPGVPGSMGDMVNYDEIKRFIRQEIIKMFDERMAYYTSRMQFPMEMAAAPGRPGPPGKDGAPGRPGAPGSPGLPGQIGREGRQGLPGVRGLPGTKGEKGDIGIGIAGENGLPGPPGPQGPPGYGKMGATGPMGQQGIPGIPGPPGPMGQPGKAGHCNPSDCFGAMPMEQQYPPMKTMKGPFG

SEQ ID NO: 1224 - protein, 640 aa, Homo sapiens
MASTSTTIRSHSSSRRGFSANSARLPGVSRSGFSSVSVSRSRGSGGLGGACGGAGFGSRSLYGLGGSKRISIGGGSCAISGGYGSRAGGSYGFGGAGSGFGFGGGAGIGFGLGGGAGLAGGFGGPGFPVCPPGGIQEVTVNQSLLTPLNLQIDPTIQRVRAEEREQIKTLNNKFASFIDKVRFLEQQNKVLETKWTLLQEQGTKTVRQNLEPLFEQYINNLRRQLDSIVGERGRLDSELRGMQDLVEDFKNKYEDEINKRTAAENEFVTLKKDVDAAYMNKVELQAKADTLTDEINFLRALYDAELSQMQTHISDTSVVLSMDNNRNLDLDSIIAEVKAQYEEIAQRSRAEAESWYQTKYEELQVTAGRHGDDLRNTKQEIAEINRMIQRLRSEIDHVKKQCANLQAAIADAEQRGEMALKDAKNKLEGLEDALQKAKQDLARLLKEYQELMNVKLALDVEIATYRKLLEGEECRLNGEGVGQVNISVVQSTVSSGYGGASGRGPWGRRWSHRRCRCTARSRCASCSSTWAAWPAAPRPWVPRSGPWAPPLGRCCCARRRRRPRRRQGALPTGVSPALTSRRCWWRSCFRNTWKSRRLRPQRCRLNPPRQSRPPQSWPMEGAHPPCRMLSGTGGTFQGRR

SEQ ID NO: 1225 - protein, 1415 aa, Homo sapiens
MLSFVDTRTLLLLAVTLCLATCQSLQEETVRKGPAGDRGPRGERGPPGPPGRDGEDGPTGPPGPPGPPGPPGLGGNFAAQYDGKGVGLGPGPMGLMGPRGPPGAAGAPGPQGFQGPAGEPGEPGQTGPAGARGPAGPPGKAGEDGHPGKPGRPGERGVVGPQGARGFPGTPGLPGFKGIRGHNGLDGLKGQPGAPGVKGEPGAPGENGTPGQTGARGLPGERGRVGAPGPAGARGSDGSVGPVGPAGPIGSAGPPGFPGAPGPKGEIGAVGNAGPAGPAGPRGEVGLPGLSGPVGPPGNPGANGLTGAKGAAGLPGVAGAPGLPGPRGIPGPVGAAGATGARGLVGEPGPAGSKGESGNKGEPGSAGPQGPPGPSGEEGKRGPNGEAGSAGPPGPPGLRGSPGSRGLPGADGRAGVMGPPGSRGASGPAGVRGPNGDAGRPGEPGLMGPRGLPGSPGNIGPAGKEGPVGLPGIDGRPGPIGPAGARGEPGNIGFPGPKGPTGDPGKNGDKGHAGLAGARGAPGPDGNNGAQGPPGPQGVQGGKGEQGPPGPPGFQGLPGPSGPAGEVGKPGERGLHGEFGLPGPAGPRGERGPPGESGAAGPTGPIGSRGPSGPPGPDGNKGEPGVVGAVGTAGPSGPSGLPGERGAAGIPGGKGEKGEPGLRGEIGNPGRDGARGAPGAVGAPGPAGATGDRGEAGAAGPAGPAGPRGSPGERGEVGPAGPNGFAGPAGAAGQPGAKGERGAKGPKGENGVVGPTGPVGAAGPAGPNGPPGPAGSRGDGGPPGMTGFPGAAGRTGPPGPSGISGPPGPPGPAGKEGLRGPRGDQGPVGRTGEVGAVGPPGFAGEKGPSGEAGTAGPPGTPGPQGLLGAPGILGLPGSRGERGLPGVAGAVGEPGPLGIAGPPGARGPPGAVGSPGVNGAPGEAGRDGNPGNDGPPGRDGQPGHKGERGYPGNIGPVGAAGAPGPHGPVGPAGKHGNRGETGPSGPVGPAGAVGPRGPSGPQGIRGDKGEPGEKGPRGLPGLKGHNGLQGLPGIAGHHGDQGAPGSVGPAGPRGPAGPSGPAGKDGRTGHPGTVGPAGIRGPQGHQGPAGPPGPPGPPGPPGVSGGGYDFGYDGDFYRADQPRSAPSLRPKDYEVDATLKSLNNQIETLLTPEGSRKNPARTCRDLRLSHPEWSSGYYWIDPNQGCTMDAIKVYCDFSTGETCIRAQPENIPAKNWYRSSKDKKHVWLGETINAGSQFEYNVEGVTSKEMATQLAFMRLLANYASQNITYHCKNSIAYMDEETGNLKKAVILQGSNDVELVAEGNSRFTYTVLVDGCSKKTNEWGKTIIEYMGFLFFLFLAGSVGGLVGWLVLSEPRQMTILVNLLIVVAWDGYCSCFGKIFISWFFLPPYLNLDYLLSLLYTYTHPNITFIIVW

SEQ ID NO: 1226 - protein, 1415 aa, Homo sapiens; identical to SEQ ID NO: 1225

SEQ ID NO: 1227 - protein, 1415 aa, Homo sapiens; identical to SEQ ID NO: 1225

SEQ ID NO: 1228 - protein, 1415 aa, Homo sapiens; identical to SEQ ID NO: 1225

SEQ ID NO: 1229 - protein, 67 aa, Homo sapiens
MAAKGAHGSYLKVESELERCRAEGHWDRMPELVRQLQTLSMPGGGGNRRGSPSAAFTFPDTDFIING

SEQ ID NO: 1230 - protein, 67 aa, Homo sapiens; identical to SEQ ID NO: 1229

SEQ ID NO: 1231 - protein, 599 aa, Homo sapiens
MDMLDPGLDPAASATAAAAASHDKGPEAEEGVELQEGGDGPGAEEQTAVAITSVQQAAFGDHNIQYQFRTETNGGQVTYRVVQVTDGQLDGQGDTAGAVSVVSTAAFAGGQQAVTQVGVDGAAQRGSAGARGGLGAGASELNASGSLSNVLSSVYGAPYAAAAAAAAAQGYGAFLPYAAELPIFPQLGAQYELKDSPGVQHPAAAAAFPHPHPAFYPYGQYQFGDPSRPKNATRESTSTLKAWLNEHRKNPYPTKGEKIMLAIITKMTLTQVSTWFANARRRLKKENKMTWAPRSRTDEEGNAYGSEREEEDEEEDEEDGKRELELEEEELGGEEEDTGGEGLADDDEDEEIDLENLDGAATEPELSLAGAARRDGDLGLGPISDSKNSDSEDSSEGLEDRPLPVLSLAPAPPPVAVASPSLPSPPVSLDPCAPAPAPASALQKPKIWSLAETATSPDNPRRSPPGAGGSPPGAAVAPSALQLSPAAAAAAAHRLVSAPLGKFPAWTNRPFPGPPPGPRLHPLSLLGSAPPHLLGLPGAAGHPAAAAAFARPAEPEGGTDRCSALEVEKKLLKTAFQPVPRRPQNHLDAALVLSALSSS

SEQ ID NO: 1232 - protein, 121 aa, Homo sapiens
MSKRGRGGSSGAKFRISLGLPVGAVINCADNTGAKNLYIISVKGIKGRLNRLPAAGVGDMVMATVKKGKPELRKKVHPAVVIRQRKSYRRKDGVFLYFEDNAGVIVNNKGEMKGSAITWSC

SEQ ID NO: 1233 - protein, 325 aa, Homo sapiens
MALADSTRGLPNGGGGGGGSGSSSSSAEPPLFPDIVELNVGGQVYVTRRCTVVSVPDSLLWRMFTQQQPQELARDSKGRFFLDRDGFLFRYILDYLRDLQLVLPDYFPERSRLQREAEYFELPELVRRLGAPQQPGPGPPPSRRGVHKEGSLGDELLPLGYSEPEQQEGASAGAPSPTLELASRSPSGGAAGPLLTPSQSLDGSRRSGYITIGYRGSYTIGRDAQADAKFRRVARITVCGKTSLAKEVFGDTLNESRDPDRPPERYTSRYYLKFNFLEQAFDKLSESGFHMVACSSTGTCAFASSTDQSEDKIWTSYTEYVFCRE

SEQ ID NO: 1234 - protein, 2557 aa, Homo sapiens
MFSFVDLRLLLLLAATALLTHGQEEGQVEGQDEDIPPITCVQNGLRYHDRDVWKPEPCRICVCDNGKVLCDDVICDETKNCPGAEVPEGECCPVCPDGSESPTDQETTGVEGPKGDTGPRGPRGPAGPPGRDGIPGQPGLPGPPGPPGPPGPPGLGGNFAPQLSYGYDEKSTGGISVPGPMGPSGPRGLPGPPGAPGPQGFQGPPGEPGEPGASGPMGPRGPPGPPGKNGDDGEAGKPGRPGERGPPGPQGARGLPGTAGLPGMKGHRGFSGLDGAKGDAGPAGPKGEPGSPGENGAPGQMGPRGLPGERGRPGAPGPAGARGNDGATGAAGPPGPTGPAGPPGFPGAVGAKGEAGPQGPRGSEGPQGVRGEPGPPGPAGAAGPAGNPGADGQPGAKGANGAPGIAGAPGFPGARGPSGPQGPGGPPGPKGNSGEPGAPGSKGDTGAKGEPGPVGVQGPPGPAGEEGKRGARGEPGPTGLPGPPGERGGPGSRGFPGADGVAGPKGPAGERGSPGPAGPKGSPGEAGRPGEAGLPGAKGLTGSPGSPGPDGKTGPPGPAGQDGRPGPPGPPGARGQAGVMGFPGPKGAAGEPGKAGERGVPGPPGAVGPAGKDGEAGAQGPPGPAGPAGERGEQGPAGSPGFQGLPGPAGPPGEAGKPGEQGVPGDLGAPGPSGARGERGFPGERGVQGPPGPAGPRGANGAPGNDGAKGDAGAPGAPGSQGAPGLQGMPGERGAAGLPGPKGDRGDAGPKGADGSPGKDGVRGLTGPIGPPGPAGAPGDKGESGPSGPAGPTGARGAPGDRGEPGPPGPAGFAGPPGADGQPGAKGEPGDAGAKGDAGPPGPAGPAGPPGPIGNVGAPGAKGARGSAGPPGATGFPGAAGRVGPPGPSGNAGPPGPPGPAGKEGGKGPRGETGPAGRPGEVGPPGPPGPAGEKGSPGADGPAGAPGTPGPQGIAGQRGVVGLPGQRGERGFPGLPGPSGEPGKQGPSGASGERGPPGPMGPPGLAGPPGESGREGAPGAEGSPGRDGSPGAKGDRGETGPAGPPGAPGAPGAPGPVGPAGKSGDRGETGPAGPTGPVGPVGARGPAGPQGPRGDKGETGEQGDRGIKGHRGFSGLQGPPGPPGSPGEQGPSGASGPAGPRGPPGSAGAPGKDGLNGLPGPIGPPGPRGRTGDAGPVGPPGPPGPPGPPGPPSAGFDFSFLPQPPQEKAHDGGRYYRADDANVVRDRDLEVDTTLKSLSQQIENIRSPEGSRKNPARTCRDLKMCHSDWKSGEYWIDPNQGCNLDAIKVFCNMETGETCVYPTQPSVAQKNWYISKNPKDKRHVWFGESMTDGFQFEYGGQGSDLTGLLVGTLDVVLDSSARVAPYRILHQTQDSQVYWTVACGSSRKEITKHWEWLENNLLQTLSIFDSEEDITTFVKGKIHGIIAEENKNLQPQGDEDPGKFKEAELKMRKQFGMPEGEKLVNYYSCSYWKGRVPRQGWLYLTVNHLCFYSFLLGKEVSLVVQWVDITRLEKNATLLFPESIRVDTRDQELFFSMFLNIGETFKLMEQLANLAMRQLLDSEGFLEDKALPRPIRPHRNISALKRDLDARAKNECYRATFRLPRDERLDGHTSCTLWTPFNKLHIPGQMFISNNYICFASKEEDACHLIIPLREVTIVEKADSSSVLPSPLSISTKSKMTFLFANLKDRDFLVQRISDFLQKTPSKQPGSIGSRKASVVDPSTESSPAPQEGSEQPASPASPLSSRQSFCAQEAPTASQGLLKLFQKNSPMEDLGAKGAKEKMKEESWHIHFFEYGRGVCMYRTAKTRALVLKGIPESLRGELWLLFSGAWNEMVTHPGYYAELVEKSTGKYSLATEEIERDLHRSMPEHPAFQNELGIAALRRVLTAYAFRNPTIGYCQAMNIVTSVLLLYGSEEEAFWLLVALCERMLPDYYNTRVVGALVDQGIFEELTRDFLPQLSEKMQDLGVISSISLSWFLTLFLSVMPFESAVVIVDCFFYEGIKVILQVALAVLDANMEQLLGCSDEGEAMTMLGRYLDNVVNKQSVSPPIPHLRALLSSSDDPPAEVDIFELLKVSYEKFSSLRAEDIEQMRFKQRLKVIQSLEDTAKRSVVRAIPVDIGFSIEELEDLYMVFKAKHLASQYWGCSRTMAGRRDPSLPYLEQYRIDASQFRELFASLTPWACGSHTPLLAGRMFRLLDENKDSLINFKEFVTGMSGMYHGDLTEKLKVLYKLHLPPALSPEEAESALEAAHYFTEDSSSEASPLASDLDLFLPWEAQEALPQEEQEGSGSEERGEEKGTSSPDYRHYLRMWAKEKEAQKETIKDLPKMNQEQFIELCKTLYNMFSEDPMEQDLYHAIATVASLLLRIGEVGKKFSARTGRKPRDCATEEDEPPAPELHQDAARELQPPAAGDPQAKAGGDTHLGKAPQESQVVVEGGSGEGQGSPSQLLSDDETKDDMSMSSYSVVSTGSLQCEDLADDTVLVGGEACSPTARIGGTVDTDWCISFEQILASILTESVLVNFFEKRVDIGLKIKDQKKVERQFSTASDHEQPGVSG

SEQ ID NO: 1235 - protein, 2540 aa, Homo sapiens
MFSFVDLRLLLLLAATALLTHGQEEGQVEGQDEDIPPITCVQNGLRYHDRDVWKPEPCRICVCDNGKVLCDDVICDETKNCPGAEVPEGECCPVCPDGSESPTDQETTGVEGPKGDTGPRGPRGPAGPPGRDGIPGQPGLPGPPGPPGPPGPPGLGGNFAPQLSYGYDEKSTGGISVPGPMGPSGPRGLPGPPGAPGPQGFQGPPGEPGEPGASGPMGPRGPPGPPGKNGDDGEAGKPGRPGERGPPGPQGARGLPGTAGLPGMKGHRGFSGLDGAKGDAGPAGPKGEPGSPGENGAPGQMGPRGLPGERGRPGAPGPAGARGNDGATGAAGPPGPTGPAGPPGFPGAVGAKGEAGPQGPRGSEGPQGVRGEPGPPGPAGAAGPAGNPGADGQPGAKGANGAPGIAGAPGFPGARGPSGPQGPGGPPGPKGNSGEPGAPGSKGDTGAKGEPGPVGVQGPPGPAGEEGKRGARGEPGPTGLPGPPGERGGPGSRGFPGADGVAGPKGPAGERGSPGPAGPKGSPGEAGRPGEAGLPGAKGLTGSPGSPGPDGKTGPPGPAGQDGRPGPPGPPGARGQAGVMGFPGPKGAAGEPGKAGERGVPGPPGAVGPAGKDGEAGAQGPPGPAGPAGERGEQGPAGSPGFQGLPGPAGPPGEAGKPGEQGVPGDLGAPGPSGARGERGFPGERGVQGPPGPAGPRGANGAPGNDGAKGDAGAPGAPGSQGAPGLQGMPGERGAAGLPGPKGDRGDAGPKGADGSPGKDGVRGLTGPIGPPGPAGAPGDKGESGPSGPAGPTGARGAPGDRGEPGPPGPAGFAGPPGADGQPGAKGEPGDAGAKGDAGPPGPAGPAGPPGPIGNVGAPGAKGARGSAGPPGATGFPGAAGRVGPPGPSGNAGPPGPPGPAGKEGGKGPRGETGPAGRPGEVGPPGPPGPAGEKGSPGADGPAGAPGTPGPQGIAGQRGVVGLPGQRGERGFPGLPGPSGEPGKQGPSGASGERGPPGPMGPPGLAGPPGESGREGAPGAEGSPGRDGSPGAKGDRGETGPAGPPGAPGAPGAPGPVGPAGKSGDRGETGPAGPTGPVGPVGARGPAGPQGPRGDKGETGEQGDRGIKGHRGFSGLQGPPGPPGSPGEQGPSGASGPAGPRGPPGSAGAPGKDGLNGLPGPIGPPGPRGRTGDAGPVGPPGPPGPPGPPGPPSAGFDFSFLPQPPQEKAHDGGRYYRADDANVVRDRDLEVDTTLKSLSQQIENIRSPEGSRKNPARTCRDLKMCHSDWKSGEYWIDPNQGCNLDAIKVFCNMETGETCVYPTQPSVAQKNWYISKNPKDKRHVWFGESMTDGFQFEYGGQGSDLTGLLVGTLDVVLDSSARVAPYRILHQTQDSQVYWTVACGSSRKEITKHWEWLENNLLQTLSIFDSEEDITTFVKGKIHGIIAEENKNLQPQGDEDPGKFKEAELKMRKQFGMPEGEKLVNYYSCSYWKGRVPRQGWLYLTVNHLCFYSFLLGKEVSLVVQWVDITRLEKNATLLFPESIRVDTRDQELFFSMFLNIGETFKLMEQLANLAMRQLLDSEGFLEDKALPRPIRPHRNISALKRDLDARAKNECYRATFRLPRDERLDGHTSCTLWTPFNKLHIPGQMFISNNYICFASKEEDACHLIIPLREVTIVEKADSSSVLPSPLSISTKSKMTFLFANLKDRDFLVQRISDFLQKTPSKQPGSIGSRKASVVDPSTESSPAPQEGSEQPASPASPLSSRQSFCAQEAPTASQGLLKLFQKNSPMEDLGAKGAKEKMKEESWHIHFFEYGRGVCMYRTAKTRALVLKGIPESLRGELWLLFSGAWNEMVTHPGYYAELVEKSTGKYSLATEEIERDLHRSMPEHPAFQNELGIAALRRVLTAYAFRNPTIGYCQAMNIVTSVLLLYGSEEEAFWLLVALCERMLPDYYNTRVVGALVDQGIFEELTRDFLPQLSEKMQDLGVISSISLSWFLTLFLSVMPFESAVVIVDCFFYEGIKVILQVALAVLDANMEQLLGCSDEGEAMTMLGRYLDNVVNKQSVSPPIPHLRALLSSSDDPPAEVDIFELLKVSYEKFSSLRAEDIEQMRFKQRLKVIQSLEDTAKRSVVRAIPVDIGFSIEELEDLYMVFKAKHLASQYWGCSRTMAGRRDPSLPYLEQYRIDASQFRELFASLTPWACGSHTPLLAGRMFRLLDENKDSLINFKEFVTGMSGMYHGDLTEKLKVLYKLHLPPALSPEEAESALEAAHYFTEDSSSEEALPQEEQEGSGSEERGEEKGTSSPDYRHYLRMWAKEKEAQKETIKDLPKMNQEQFIELCKTLYNMFSEDPMEQDLYHAIATVASLLLRIGEVGKKFSARTGRKPRDCATEEDEPPAPELHQDAARELQPPAAGDPQAKAGGDTHLGKAPQESQVVVEGGSGEGQGSPSQLLSDDETKDDMSMSSYSVVSTGSLQCEDLADDTVLVGGEACSPTARIGGTVDTDWCISFEQILASILTESVLVNFFEKRVDIGLKIKDQKKVERQFSTASDHEQPGVSG

SEQ ID NO: 1236 - protein, 144 aa, Homo sapiens
MSMLRLQKRLASSVLRCGKKKVWLDPNGLIKVNGRPLEMIEPRTLQYKLLEPVLLLGKERFAGVDIRVRVKGGGHVAQIYAIRQSISKALVAYYQKYVDEASKKEIKDILIQYDRTLLVADPRRCESKKFGGPGARARYQKSYR

SEQ ID NO: 1237 - protein, 10 aa, Homo sapiens
MRACSQFCAS

SEQ ID NO: 1238 - protein, 33 aa, Homo sapiens
AAIRHRSRSALPECTGSPRETKMARGCIEVGCV

SEQ ID NO: 1239 - protein, 10 aa, Homo sapiens
MRACSQFCAS

SEQ ID NO: 1240 - protein, 33 aa, Homo sapiens; identical to SEQ ID NO: 1238

SEQ ID NO: 1241 - protein, 10 aa, Homo sapiens
MRACSQFCAS

SEQ ID NO: 1242 - protein, 33 aa, Homo sapiens; identical to SEQ ID NO: 1238

SEQ ID NO: 1243 - protein, 10 aa, Homo sapiens
MRACSQFCAS

SEQ ID NO: 1244 - protein, 33 aa, Homo sapiens; identical to SEQ ID NO: 1238

SEQ ID NO: 1245 - protein, 59 aa, Homo sapiens
MDVGSKEVLMESPPDYSAAPRGRFGIPCCPVHLKRLLIVVVGPPNPPNRATTSTRPAAT

SEQ ID NO: 1246 - protein, 59 aa, Homo sapiens; identical to SEQ ID NO: 1245

SEQ ID NO: 1247 - protein, 59 aa, Homo sapiens; identical to SEQ ID NO: 1245

SEQ ID NO: 1248 - protein, 59 aa, Homo sapiens; identical to SEQ ID NO: 1245

SEQ ID NO: 1249 - protein, 59 aa, Homo sapiens; identical to SEQ ID NO: 1245

SEQ ID NO: 1250 - protein, 59 aa, Homo sapiens; identical to SEQ ID NO: 1245

SEQ ID NO: 1251 - protein, 12 aa, Homo sapiens
MWRGIDSIYPYE

SEQ ID NO: 1252 - protein, 12 aa, Homo sapiens
MWRGIDSIYPYE

SEQ ID NO: 1253 - protein, 12 aa, Homo sapiens
MWRGIDSIYPYE

SEQ ID NO: 1254 - protein, 12 aa, Homo sapiens
MWRGIDSIYPYE

SEQ ID NO: 1255 - protein, 206 aa, Homo sapiens
MAAAMTFCRLLNRCGEAARSLPLGARCFGVRVSPTGEKVTHTGQVYDDKDYRRIRFVGRQKEVNENFAIDLIAEQPVSEVETRVIACDGGGGALGHPKVYINLDKETGFFFFFGLTQDLKTGTVKVTAVGWSEHPPKFTMWPRTLIAHCCFFNSHSKYEMRCYRKSLAILKATPLLSKENGPVLSQVHTGEVIALLSCKLCNAKFF

SEQ ID NO: 1256 - protein, 910 aa, Homo sapiens
MLSFVDTRTLLLLAVTLCLATCQSLQEETVRKGPAGDRGPRGERGPPGPPGRDGEDGPTGPPGPPGPPGPPGLGGNFAAQYDGKGVGLGPGPMGLMGPRGPPGAAGAPGPQGFQGPAGEPGEPGQTGPAGARGPAGPPGKAGEDGHPGKPGRPGERGVVGPQGARGFPGTPGLPGFKGIRGHNGLDGLKGQPGAPGVKGEPGAPGENGTPGQTGARGLPGERGRVGAPGPAGARGSDGSVGPVGPAGPIGSAGPPGFPGAPGPKGEIGAVGNAGPAGPAGPRGEVGLPGLSGPVGPPGNPGANGLTGAKGAAGLPGVAGAPGLPGPRGIPGPVGAAGATGARGLVGEPGPAGSKGESGNKGEPGSAGPQGPPGPSGEEGKRGPNGEAGSAGPPGPPGLRGSPGSRGLPGADGRAGVMGPPGSRGASGPAGVRGPNGDAGRPGEPGLMGPRGLPGSPGNIGPAGKEGPVGLPGIDGRPGPIGPAGARGEPGNIGFPGPKGPTGDPGKNGDKGHAGLAGARGAPGPDGNNGAQGPPGPQGVQGGKGEQGPPGPPGFQGLPGPSGPAGEVGKPGERGLHGEFGLPGPAGPRGERGPPGESGAAGPTGPIGSRGPSGPPGPDGNKGEPGVVGAVGTAGPSGPSGLPGERGAAGIPGGKGEKGEPGLRGEIGNPGRDGARGAPGAVGAPGPAGATGDRGEAGAAGPAGPAGPRGSPGERGEVGPAGPNGFAGPAGAAGQPGAKGERGAKGPKGENGVVGPTGPVGAAGPAGPNGPPGPAGSRGDGGPPGMTGFPGAAGRTGPPGPSGISGPPGPPGPAGKEGLRGPRGDQGPVGRTGEVGAVGPPGFAGEKGPSGEAGTAGPPGTPGPQGLLGAPGILGLPGSAVPVSGGAVPAFLPGYGILRHPRDHLQLHHEV

SEQ ID NO: 1257 - protein, 47 aa, Homo sapiens
VLAQNSPRGDHALRVGARVKRRRPSGKMAAAEALERGNLEPGWRRLH

SEQ ID NO: 1258 - protein, 46 aa, Homo sapiens
LVLRPPRGGAALAPRHLGGRPPTPRRSGKWLRDPRGLRSLLHGNSL

SEQ ID NO: 1259 - protein, 46 aa, Homo sapiens; identical to SEQ ID NO: 1258

SEQ ID NO: 1260 - protein, 47 aa, Homo sapiens; identical to SEQ ID NO: 1257

SEQ ID NO: 1261 - protein, 54 aa, Homo sapiens
LVLRPPRGGAALAPRHLGGRPPTPRRSGKWLRDPRGLRPAELTPREQPLDNLSC

SEQ ID NO: 1262 - protein, 47 aa, Homo sapiens; identical to SEQ ID NO: 1257

SEQ ID NO: 1263 - protein, 47 aa, Homo sapiens; identical to SEQ ID NO: 1257

SEQ ID NO: 1264 - protein, 47 aa, Homo sapiens; identical to SEQ ID NO: 1257

SEQ ID NO: 1265 - protein, 46 aa, Homo sapiens; identical to SEQ ID NO: 1258

SEQ ID NO: 1266 - protein, 46 aa, Homo sapiens; identical to SEQ ID NO: 1258

SEQ ID NO: 1267 - protein, 46 aa, Homo sapiens; identical to SEQ ID NO: 1258

SEQ ID NO: 1268 - protein, 46 aa, Homo sapiens; identical to SEQ ID NO: 1258

SEQ ID NO: 1269 - protein, 47 aa, Homo sapiens; identical to SEQ ID NO: 1257

SEQ ID NO: 1270 - protein, 47 aa, Homo sapiens; identical to SEQ ID NO: 1257

SEQ ID NO: 1271 - protein, 54 aa, Homo sapiens; identical to SEQ ID NO: 1261

SEQ ID NO: 1272 - protein, 54 aa, Homo sapiens; identical to SEQ ID NO: 1261

SEQ ID NO: 1273 - protein, 47 aa, Homo sapiens; identical to SEQ ID NO: 1257

SEQ ID NO: 1274 - protein, 47 aa, Homo sapiens; identical to SEQ ID NO: 1257

SEQ ID NO: 1275 - protein, 1812 aa, Homo sapiens
MDDFERRRELRRQKREEMRLEAERIAYQRNDDDEEEAARERRRRARQERLRQKQEEESLGQVTDQVEVNAQNSVPDEEAKTTTTNTQVEGDDEAAFLERLARREERRQKRLQEALERQKEFDPTITDASLSLPSRRMQNDTAENETTEKEEKSESRQERYEIEETETVTKSYQKNDWRDAEENKKEDKEKEEEEEEKPKRGSIGENQGEEKGTKVQAKREKLQEDKPTFKKEEIKDEKIKKDKEPKEEVKSFMDRKKGFTEVKSQNGEFMTHKLKHTENTFSRPGGRASVDTKEAEGAPQVEAGKRLEELRRRRGETESEEFEKLKQKQQEAALELEELKKKREERRKVLEEEEQRLLLLLAATALLTHGQEEGQVEGQDEDIPPITCVQNGLRYHDRDVWKPEPCRICVCDNGKVLCDDVICDETKNCPGAEVPEGECCPVCPDGSESPTDQETTGVEGPKGDTGPRGPRGPAGPPGRDGIPGQPGLPGPPGPPGPPGPPGLGGNFAPQLSYGYDEKSTGGISVPGPMGPSGPRGLPGPPGAPGPQGFQGPPGEPGEPGASGPMGPRGPPGPPGKNGDDGEAGKPGRPGERGPPGPQGARGLPGTAGLPGMKGHRGFSGLDGAKGDAGPAGPKGEPGSPGENGAPGQMGPRGLPGERGRPGAPGPAGARGNDGATGAAGPPGPTGPAGPPGFPGAVGAKGEAGPQGPRGSEGPQGVRGEPGPPGPAGAAGPAGNPGADGQPGAKGANGAPGIAGAPGFPGARGPSGPQGPGGPPGPKGNSGEPGAPGSKGDTGAKGEPGPVGVQGPPGPAGEEGKRGARGEPGPTGLPGPPGERGGPGSRGFPGADGVAGPKGPAGERGSPGPAGPKGSPGEAGRPGEAGLPGAKGLTGSPGSPGPDGKTGPPGPAGQDGRPGPPGPPGARGQAGVMGFPGPKGAAGEPGKAGERGVPGPPGAVGPAGKDGEAGAQGPPGPAGPAGERGEQGPAGSPGFQGLPGPAGPPGEAGKPGEQGVPGDLGAPGPSGARGERGFPGERGVQGPPGPAGPRGANGAPGNDGAKGDAGAPGAPGSQGAPGLQGMPGERGAAGLPGPKGDRGDAGPKGADGSPGKDGVRGLTGPIGPPGPAGAPGDKGESGPSGPAGPTGARGAPGDRGEPGPPGPAGFAGPPGADGQPGAKGEPGDAGAKGDAGPPGPAGPAGPPGPIGNVGAPGAKGARGSAGPPGATGFPGAAGRVGPPGPSGNAGPPGPPGPAGKEGGKGPRGETGPAGRPGEVGPPGPPGPAGEKGSPGADGPAGAPGTPGPQGIAGQRGVVGLPGQRGERGFPGLPGPSGEPGKQGPSGASGERGPPGPMGPPGLAGPPGESGREGAPGAEGSPGRDGSPGAKGDRGETGPAGPPGAPGAPGAPGPVGPAGKSGDRGETGPAGPTGPVGPVGARGPAGPQGPRGDKGETGEQGDRGIKGHRGFSGLQGPPGPPGSPGEQGPSGASGPAGPRGPPGSAGAPGKDGLNGLPGPIGPPGPRGRTGDAGPVGPPGPPGPPGPPGPPSAGFDFSFLPQPPQEKAHDGGRYYRADDANVVRDRDLEVDTTLKSLSQQIENIRSPEGSRKNPARTCRDLKMCHSDWKSGEYWIDPNQGCNLDAIKVFCNMETGETCVYPTQPSVAQKNWYISKNPKDKRHVWFGESMTDGFQFEYGGQGSDPADVAIQLTFLRLMSTEASQNITYHCKNSVAYMDQQTGNLKKALLLQGSNEIEIRAEGNSRFTYSVTVDGCTSHTGAWGKTVIEYKTTKTSRLPIIDVAPLDVGAPDQEFGFDVGPVCFL

SEQ ID NO: 1276 - protein, 2041 aa, Homo sapiens
MDDFERRRELRRQKREEMRLEAERIAYQRNDDDEEEAARERRRRARQERLRQKQEEESLGQVTDQVEVNAQNSVPDEEAKTTTTNTQVEGDDEAAFLERLARREERRQKRLQEALERQKEFDPTITDASLSLPSRRMQNDTAENETTEKEEKSESRQERYEIEETETVTKSYQKNDWRDAEENKKEDKEKEEEEEEKPKRGSIGENQVEVMVEEKTTESQEETVVMSLKNGQISSEEPKQEEEREQGSDEISHHEKMEEEDKERAEAERARLEAEERERIKAEQDKKIADERARIEAEEKAAAQERERREAEERERMREEEKRAAEERQRIKEEEKRAAEERQRIKEEEKRAAEERQRIKEEEKRAAEERQRARAEEEEKAKVEEQKRNKQLEEKKHAMQETKIKGEKVEQKIEGKWVNEKKAQEDKLQTAVLKKQGEEKGTKVQAKREKLQEDKPTFKKEEIKDEKIKKDKEPKEEVKSFMDRKKGFTEVKSQNGEFMTHKLKHTENTFSRPGGRASVDTKEAEGAPQVEAGKRLEELRRRRGETESEEFEKLKQKQQEAALELEELKKKREERRKVLEEEEQRLLLLLAATALLTHGQEEGQVEGQDEDIPPITCVQNGLRYHDRDVWKPEPCRICVCDNGKVLCDDVICDETKNCPGAEVPEGECCPVCPDGSESPTDQETTGVEGPKGDTGPRGPRGPAGPPGRDGIPGQPGLPGPPGPPGPPGPPGLGGNFAPQLSYGYDEKSTGGISVPGPMGPSGPRGLPGPPGAPGPQGFQGPPGEPGEPGASGPMGPRGPPGPPGKNGDDGEAGKPGRPGERGPPGPQGARGLPGTAGLPGMKGHRGFSGLDGAKGDAGPAGPKGEPGSPGENGAPGQMGPRGLPGERGRPGAPGPAGARGNDGATGAAGPPGPTGPAGPPGFPGAVGAKGEAGPQGPRGSEGPQGVRGEPGPPGPAGAAGPAGNPGADGQPGAKGANGAPGIAGAPGFPGARGPSGPQGPGGPPGPKGNSGEPGAPGSKGDTGAKGEPGPVGVQGPPGPAGEEGKRGARGEPGPTGLPGPPGERGGPGSRGFPGADGVAGPKGPAGERGSPGPAGPKGSPGEAGRPGEAGLPGAKGLTGSPGSPGPDGKTGPPGPAGQDGRPGPPGPPGARGQAGVMGFPGPKGAAGEPGKAGERGVPGPPGAVGPAGKDGEAGAQGPPGPAGPAGERGEQGPAGSPGFQGLPGPAGPPGEAGKPGEQGVPGDLGAPGPSGARGERGFPGERGVQGPPGPAGPRGANGAPGNDGAKGDAGAPGAPGSQGAPGLQGMPGERGAAGLPGPKGDRGDAGPKGADGSPGKDGVRGLTGPIGPPGPAGAPGDKGESGPSGPAGPTGARGAPGDRGEPGPPGPAGFAGPPGADGQPGAKGEPGDAGAKGDAGPPGPAGPAGPPGPIGNVGAPGAKGARGSAGPPGATGFPGAAGRVGPPGPSGNAGPPGPPGPAGKEGGKGPRGETGPAGRPGEVGPPGPPGPAGEKGSPGADGPAGAPGTPGPQGIAGQRGVVGLPGQRGERGFPGLPGPSGEPGKQGPSGASGERGPPGPMGPPGLAGPPGESGREGAPGAEGSPGRDGSPGAKGDRGETGPAGPPGAPGAPGAPGPVGPAGKSGDRGETGPAGPTGPVGPVGARGPAGPQGPRGDKGETGEQGDRGIKGHRGFSGLQGPPGPPGSPGEQGPSGASGPAGPRGPPGSAGAPGKDGLNGLPGPIGPPGPRGRTGDAGPVGPPGPPGPPGPPGPPSAGFDFSFLPQPPQEKAHDGGRYYRADDANVVRDRDLEVDTTLKSLSQQIENIRSPEGSRKNPARTCRDLKMCHSDWKSGEYWIDPNQGCNLDAIKVFCNMETGETCVYPTQPSVAQKNWYISKNPKDKRHVWFGESMTDGFQFEYGGQGSDPADVAIQLTFLRLMSTEASQNITYHCKNSVAYMDQQTGNLKKALLLQGSNEIEIRAEGNSRFTYSVTVDGCTSHTGAWGKTVIEYKTTKTSRLPIIDVAPLDVGAPDQEFGFDVGPVCFL

SEQ ID NO: 1277 - protein, 1786 aa, Homo sapiens
MDDFERRRELRRQKREEMRLEAERIAYQRNDDDEEEAARERRRRARQERLRQKQEEESLGQVTDQVEVNAQNSVPDEEAKTTTTNTQVEGDDEAAFLERLARREERRQKRLQEALERQKEFDPTITDASLSLPSRRMQNDTAENETTEKEEKSESRQERYEIEETETVTKSYQKNDWRDAEENKKEDKEKEEEEEEKPKRGSIGENQIKDEKIKKDKEPKEEVKSFMDRKKGFTEVKSQNGEFMTHKLKHTENTFSRPGGRASVDTKEAEGAPQVEAGKRLEELRRRRGETESEEFEKLKQKQQEAALELEELKKKREERRKVLEEEEQRLLLLLAATALLTHGQEEGQVEGQDEDIPPITCVQNGLRYHDRDVWKPEPCRICVCDNGKVLCDDVICDETKNCPGAEVPEGECCPVCPDGSESPTDQETTGVEGPKGDTGPRGPRGPAGPPGRDGIPGQPGLPGPPGPPGPPGPPGLGGNFAPQLSYGYDEKSTGGISVPGPMGPSGPRGLPGPPGAPGPQGFQGPPGEPGEPGASGPMGPRGPPGPPGKNGDDGEAGKPGRPGERGPPGPQGARGLPGTAGLPGMKGHRGFSGLDGAKGDAGPAGPKGEPGSPGENGAPGQMGPRGLPGERGRPGAPGPAGARGNDGATGAAGPPGPTGPAGPPGFPGAVGAKGEAGPQGPRGSEGPQGVRGEPGPPGPAGAAGPAGNPGADGQPGAKGANGAPGIAGAPGFPGARGPSGPQGPGGPPGPKGNSGEPGAPGSKGDTGAKGEPGPVGVQGPPGPAGEEGKRGARGEPGPTGLPGPPGERGGPGSRGFPGADGVAGPKGPAGERGSPGPAGPKGSPGEAGRPGEAGLPGAKGLTGSPGSPGPDGKTGPPGPAGQDGRPGPPGPPGARGQAGVMGFPGPKGAAGEPGKAGERGVPGPPGAVGPAGKDGEAGAQGPPGPAGPAGERGEQGPAGSPGFQGLPGPAGPPGEAGKPGEQGVPGDLGAPGPSGARGERGFPGERGVQGPPGPAGPRGANGAPGNDGAKGDAGAPGAPGSQGAPGLQGMPGERGAAGLPGPKGDRGDAGPKGADGSPGKDGVRGLTGPIGPPGPAGAPGDKGESGPSGPAGPTGARGAPGDRGEPGPPGPAGFAGPPGADGQPGAKGEPGDAGAKGDAGPPGPAGPAGPPGPIGNVGAPGAKGARGSAGPPGATGFPGAAGRVGPPGPSGNAGPPGPPGPAGKEGGKGPRGETGPAGRPGEVGPPGPPGPAGEKGSPGADGPAGAPGTPGPQGIAGQRGVVGLPGQRGERGFPGLPGPSGEPGKQGPSGASGERGPPGPMGPPGLAGPPGESGREGAPGAEGSPGRDGSPGAKGDRGETGPAGPPGAPGAPGAPGPVGPAGKSGDRGETGPAGPTGPVGPVGARGPAGPQGPRGDKGETGEQGDRGIKGHRGFSGLQGPPGPPGSPGEQGPSGASGPAGPRGPPGSAGAPGKDGLNGLPGPIGPPGPRGRTGDAGPVGPPGPPGPPGPPGPPSAGFDFSFLPQPPQEKAHDGGRYYRADDANVVRDRDLEVDTTLKSLSQQIENIRSPEGSRKNPARTCRDLKMCHSDWKSGEYWIDPNQGCNLDAIKVFCNMETGETCVYPTQPSVAQKNWYISKNPKDKRHVWFGESMTDGFQFEYGGQGSDPADVAIQLTFLRLMSTEASQNITYHCKNSVAYMDQQTGNLKKALLLQGSNEIEIRAEGNSRFTYSVTVDGCTSHTGAWGKTVIEYKTTKTSRLPIIDVAPLDVGAPDQEFGFDVGPVCFL

SEQ ID NO: 1278 - protein, 1780 aa, Homo sapiens
MLGGSGSHGRRSLAALSQIAYQRNDDDEEEAARERRRRARQERLRQKQEEESLGQVTDQVEVNAQNSVPDEEAKTTTTNTQVEGDDEAAFLERLARREERRQKRLQEALERQKEFDPTITDASLSLPSRRMQNDTAENETTEKEEKSESRQERYEIEETETVTKSYQKNDWRDAEENKKEDKEKEEEEEEKPKRGSIGENQIKDEKIKKDKEPKEEVKSFMDRKKGFTEVKSQNGEFMTHKLKHTENTFSRPGGRASVDTKEAEGAPQVEAGKRLEELRRRRGETESEEFEKLKQKQQEAALELEELKKKREERRKVLEEEEQRLLLLLAATALLTHGQEEGQVEGQDEDIPPITCVQNGLRYHDRDVWKPEPCRICVCDNGKVLCDDVICDETKNCPGAEVPEGECCPVCPDGSESPTDQETTGVEGPKGDTGPRGPRGPAGPPGRDGIPGQPGLPGPPGPPGPPGPPGLGGNFAPQLSYGYDEKSTGGISVPGPMGPSGPRGLPGPPGAPGPQGFQGPPGEPGEPGASGPMGPRGPPGPPGKNGDDGEAGKPGRPGERGPPGPQGARGLPGTAGLPGMKGHRGFSGLDGAKGDAGPAGPKGEPGSPGENGAPGQMGPRGLPGERGRPGAPGPAGARGNDGATGAAGPPGPTGPAGPPGFPGAVGAKGEAGPQGPRGSEGPQGVRGEPGPPGPAGAAGPAGNPGADGQPGAKGANGAPGIAGAPGFPGARGPSGPQGPGGPPGPKGNSGEPGAPGSKGDTGAKGEPGPVGVQGPPGPAGEEGKRGARGEPGPTGLPGPPGERGGPGSRGFPGADGVAGPKGPAGERGSPGPAGPKGSPGEAGRPGEAGLPGAKGLTGSPGSPGPDGKTGPPGPAGQDGRPGPPGPPGARGQAGVMGFPGPKGAAGEPGKAGERGVPGPPGAVGPAGKDGEAGAQGPPGPAGPAGERGEQGPAGSPGFQGLPGPAGPPGEAGKPGEQGVPGDLGAPGPSGARGERGFPGERGVQGPPGPAGPRGANGAPGNDGAKGDAGAPGAPGSQGAPGLQGMPGERGAAGLPGPKGDRGDAGPKGADGSPGKDGVRGLTGPIGPPGPAGAPGDKGESGPSGPAGPTGARGAPGDRGEPGPPGPAGFAGPPGADGQPGAKGEPGDAGAKGDAGPPGPAGPAGPPGPIGNVGAPGAKGARGSAGPPGATGFPGAAGRVGPPGPSGNAGPPGPPGPAGKEGGKGPRGETGPAGRPGEVGPPGPPGPAGEKGSPGADGPAGAPGTPGPQGIAGQRGVVGLPGQRGERGFPGLPGPSGEPGKQGPSGASGERGPPGPMGPPGLAGPPGESGREGAPGAEGSPGRDGSPGAKGDRGETGPAGPPGAPGAPGAPGPVGPAGKSGDRGETGPAGPTGPVGPVGARGPAGPQGPRGDKGETGEQGDRGIKGHRGFSGLQGPPGPPGSPGEQGPSGASGPAGPRGPPGSAGAPGKDGLNGLPGPIGPPGPRGRTGDAGPVGPPGPPGPPGPPGPPSAGFDFSFLPQPPQEKAHDGGRYYRADDANVVRDRDLEVDTTLKSLSQQIENIRSPEGSRKNPARTCRDLKMCHSDWKSGEYWIDPNQGCNLDAIKVFCNMETGETCVYPTQPSVAQKNWYISKNPKDKRHVWFGESMTDGFQFEYGGQGSDPADVAIQLTFLRLMSTEASQNITYHCKNSVAYMDQQTGNLKKALLLQGSNEIEIRAEGNSRFTYSVTVDGCTSHTGAWGKTVIEYKTTKTSRLPIIDVAPLDVGAPDQEFGFDVGPVCFL

SEQ ID NO: 1279 - protein, 1806 aa, Homo sapiens
MLGGSGSHGRRSLAALSQIAYQRNDDDEEEAARERRRRARQERLRQKQEEESLGQVTDQVEVNAQNSVPDEEAKTTTTNTQVEGDDEAAFLERLARREERRQKRLQEALERQKEFDPTITDASLSLPSRRMQNDTAENETTEKEEKSESRQERYEIEETETVTKSYQKNDWRDAEENKKEDKEKEEEEEEKPKRGSIGENQGEEKGTKVQAKREKLQEDKPTFKKEEIKDEKIKKDKEPKEEVKSFMDRKKGFTEVKSQNGEFMTHKLKHTENTFSRPGGRASVDTKEAEGAPQVEAGKRLEELRRRRGETESEEFEKLKQKQQEAALELEELKKKREERRKVLEEEEQRLLLLLAATALLTHGQEEGQVEGQDEDIPPITCVQNGLRYHDRDVWKPEPCRICVCDNGKVLCDDVICDETKNCPGAEVPEGECCPVCPDGSESPTDQETTGVEGPKGDTGPRGPRGPAGPPGRDGIPGQPGLPGPPGPPGPPGPPGLGGNFAPQLSYGYDEKSTGGISVPGPMGPSGPRGLPGPPGAPGPQGFQGPPGEPGEPGASGPMGPRGPPGPPGKNGDDGEAGKPGRPGERGPPGPQGARGLPGTAGLPGMKGHRGFSGLDGAKGDAGPAGPKGEPGSPGENGAPGQMGPRGLPGERGRPGAPGPAGARGNDGATGAAGPPGPTGPAGPPGFPGAVGAKGEAGPQGPRGSEGPQGVRGEPGPPGPAGAAGPAGNPGADGQPGAKGANGAPGIAGAPGFPGARGPSGPQGPGGPPGPKGNSGEPGAPGSKGDTGAKGEPGPVGVQGPPGPAGEEGKRGARGEPGPTGLPGPPGERGGPGSRGFPGADGVAGPKGPAGERGSPGPAGPKGSPGEAGRPGEAGLPGAKGLTGSPGSPGPDGKTGPPGPAGQDGRPGPPGPPGARGQAGVMGFPGPKGAAGEPGKAGERGVPGPPGAVGPAGKDGEAGAQGPPGPAGPAGERGEQGPAGSPGFQGLPGPAGPPGEAGKPGEQGVPGDLGAPGPSGARGERGFPGERGVQGPPGPAGPRGANGAPGNDGAKGDAGAPGAPGSQGAPGLQGMPGERGAAGLPGPKGDRGDAGPKGADGSPGKDGVRGLTGPIGPPGPAGAPGDKGESGPSGPAGPTGARGAPGDRGEPGPPGPAGFAGPPGADGQPGAKGEPGDAGAKGDAGPPGPAGPAGPPGPIGNVGAPGAKGARGSAGPPGATGFPGAAGRVGPPGPSGNAGPPGPPGPAGKEGGKGPRGETGPAGRPGEVGPPGPPGPAGEKGSPGADGPAGAPGTPGPQGIAGQRGVVGLPGQRGERGFPGLPGPSGEPGKQGPSGASGERGPPGPMGPPGLAGPPGESGREGAPGAEGSPGRDGSPGAKGDRGETGPAGPPGAPGAPGAPGPVGPAGKSGDRGETGPAGPTGPVGPVGARGPAGPQGPRGDKGETGEQGDRGIKGHRGFSGLQGPPGPPGSPGEQGPSGASGPAGPRGPPGSAGAPGKDGLNGLPGPIGPPGPRGRTGDAGPVGPPGPPGPPGPPGPPSAGFDFSFLPQPPQEKAHDGGRYYRADDANVVRDRDLEVDTTLKSLSQQIENIRSPEGSRKNPARTCRDLKMCHSDWKSGEYWIDPNQGCNLDAIKVFCNMETGETCVYPTQPSVAQKNWYISKNPKDKRHVWFGESMTDGFQFEYGGQGSDPADVAIQLTFLRLMSTEASQNITYHCKNSVAYMDQQTGNLKKALLLQGSNEIEIRAEGNSRFTYSVTVDGCTSHTGAWGKTVIEYKTTKTSRLPIIDVAPLDVGAPDQEFGFDVGPVCFL

SEQ ID NO: 1280 - protein, 1993 aa, Homo sapiens
MAQQAADKYLYVDKNFINNPLAQADWAAKKLVWVPSDKSGFEPASLKEEVGEEAIVELVENGKKVKVNKDDIQKMNPPKFSKVEDMAELTCLNEASVLHNLKERYYSGLIYTYSGLFCVVINPYKNLPIYSEEIVEMYKGKKRHEMPPHIYAITDTAYRSMMQDREDQSILCTGESGAGKTENTKKVIQYLAYVASSHKSKKDQGELERQLLQANPILEAFGNAKTVKNDNSSRFGKFIRINFDVNGYIVGANIETYLLEKSRAIRQAKEERTFHIFYYLLSGAGEHLKTDLLLEPYNKYRFLSNGHVTIPGQQDKDMFQETMEAMRIMGIPEEEQMGLLRVISGVLQLGNIVFKKERNTDQASMPDNTAAQKVSHLLGINVTDFTRGILTPRIKVGRDYVQKAQTKEQADFAIEALAKATYERMFRWLVLRINKALDKTKRQGASFIGILDIAGFEIFDLNSFEQLCINYTNEKLQQLFNHTMFILEQEEYQREGIEWNFIDFGLDLQPCIDLIEKPAGPPGILALLDEECWFPKATDKSFVEKVMQEQGTHPKFQKPKQLKDKADFCIIHYAGKVDYKADEWLMKNMDPLNDNIATLLHQSSDKFVSELWKDVDRIIGLDQVAGMSETALPGAFKTRKGMFRTVGQLYKEQLAKLMATLRNTNPNFVRCIIPNHEKKAGKLDPHLVLDQLRCNGVLEGIRICRQGFPNRVVFQEFRQRYEILTPNSIPKGFMDGKQACVLMIKALELDSNLYRIGQSKVFFRAGVLAHLEEERDLKITDVIIGFQACCRGYLARKAFAKRQQQLTAMKVLQRNCAAYLKLRNWQWWRLFTKVKPLLQVSRQEEEMMAKEEELVKVREKQLAAENRLTEMETLQSQLMAEKLQLQEQLQAETELCAEAEELRARLTAKKQELEEICHDLEARVEEEEERCQHLQAEKKKMQQNIQELEEQLEEEESARQKLQLEKVTTEAKLKKLEEEQIILEDQNCKLAKEKKLLEDRIAEFTTNLTEEEEKSKSLAKLKNKHEAMITDLEERLRREEKQRQELEKTRRKLEGDSTDLSDQIAELQAQIAELKMQLAKKEEELQAALARVEEEAAQKNMALKKIRELESQISELQEDLESERASRNKAEKQKRDLGEELEALKTELEDTLDSTAAQQELRSKREQEVNILKKTLEEEAKTHEAQIQEMRQKHSQAVEELAEQLEQTKRVKANLEKAKQTLENERGELANEVKVLLQGKGDSEHKRKKVEAQLQELQVKFNEGERVRTELADKVTKLQVELDNVTGLLSQSDSKSSKLTKDFSALESQLQDTQELLQEENRQKLSLSTKLKQVEDEKNSFREQLEEEEEAKHNLEKQIATLHAQVADMKKKMEDSVGCLETAEEVKRKLQKDLEGLSQRHEEKVAAYDKLEKTKTRLQQELDDLLVDLDHQRQSACNLEKKQKKFDQLLAEEKTISAKYAEERDRAEAEAREKETKALSLARALEEAMEQKAELERLNKQFRTEMEDLMSSKDDVGKSVHELEKSKRALEQQVEEMKTQLEELEDELQATEDAKLRLEVNLQAMKAQFERDLQGRDEQSEEKKKQLVRQVREMEAELEDERKQRSMAVAARKKLEMDLKDLEAHIDSANKNRDEAIKQLRKLQAQMKDCMRELDDTRASREEILAQAKENEKKLKSMEAEMIQLQEELAAAERAKRQAQQERDELADEIANSSGKGALALEEKRRLEARIAQLEEELEEEQGNTELINDRLKKANLQIDQINTDLNLERSHAQKNENARQQLERQNKELKVKLQEMEGTVKSKYKASITALEAKIAQLEEQLDNETKERQAACKQVRRTEKKLKDVLLQAAHPPPSGATAAAAGVSVPTQPGSLGSAALASAASPCPAPGAVVAWVAHVEELALAAAVCMAWGAPRGSPLEGAAVPSVAAMAAEPEAAMALVAPGVDLVSVVEPALALVWVVEPALLVALGALASLCAPLEASKRSLSTRVS

SEQ ID NO: 1281 - protein, 715 aa, Homo sapiens
MVQQTNNAENTEALLAGESSDSGAGLELGIASSPTPGSTASTGGKADDPSWCKTPSGHIKRPMNAFMVWSQIERRKIMEQSPDMHNAEISKRLGKRWKLLKDSDKIPFIREAERLRLKHMADYPDYKYRPRKKVKSGNANSSSSAAASSKPGEKGDKVGGSGGGGHGGGGFGRVSLAGACGVGGYGSRSLYNLGGSKRISISTSGGSFRNRFGAGAGGGYGFGGGAGSGFGFGGGAGGGFGLGGGAGFGGGFGGPGFPVCPPGGIQEVTVNQSLLTPLNLQIDPSIQRVRTEEREQIKTLNNKFASFIDKVRFLEQQNKVLDTKWTLLQEQGTKTVRQNLEPLFEQYINNLRRQLDSIVGERGRLDSELRNMQDLVEDFKNKYEDEINKRTTAENEFVMLKKDVDAAYMNKVELEAKVDALMDEINFMKMFFDAELSQMQTHVSDTSVVLSMDNNRNLDLDSIIAEVKAQYEEIANRSRTEAESWYQTKYEELQQTAGRHGDDLRNTKHEISEMNRMIQRLRAEIDNVKKQCANLQNAIADAEQRGELALKDARNKLAELEEALQKAKQDMARLLREYQELMNTKLALDVEIATYRKLLEGEECRLSGEGVGPVNISVVTSSVSSGYGSGSGYGGGLGGGLGGGLGGGLAGGSSGSYYSSSSGGVGLGGGLSVGGSGFSASSGRGLGVGFGSGGGSSSSVKFVSTTSSSRKSFKS

SEQ ID NO: 1282 - protein, 848 aa, Homo sapiens
MNGQLDLSGKLIIKAQLGEDIRRIPIHNEDITYDELVLMMQRVFRGKLLSNDEVTIKYKDEDGDLITIFDSSDLSFAIQCSRILKLTLFGKSTSSSSTPTEFCRNGGTWENGRCICTEEWKGLRCTIANFCENSTYMGFTFARIPVGRYGPSLQTCGKDTPNAGNPMAVRLCSLSLYGEIELQKVTIGNCNENLETLEKQVKDVTAPLNNISSEVQILTSDANKLTAENITSATRVVGQIFNTSRNASPEAKKVAIVTVSQLLDASEDAFQRVAATANDDALTTLIEQMETYSLSLGNQSVVEPNIAIQSANFSSENAVGPSNVRFSVQKGASSSLVSSSTFIHTNVDGLNPDAQTELQVLLNMTKNYTKTCGFVVYQNDKLFQSKTFTAKSDFSQKIISSKTDENEQDQSASVDMVFSPKYNQKEFQLYSYACVYWNLSAKDWDTYGCQKDKGTDGFLRCRCNHTTNFAVLMTFKKDYQYPKSLDILSNVGCALSVTGLALTVIFQIVTRKVRKTSVTWVLVNLCISMLIFNLLFVFGIENSNKNLQTSDGDINNIDFDNNDIPRTDTINIPNPMCTAIAALLHYFLLVTFTWNALSAAQLYYLLIRTMKPLPRHFILFISLIGWGVPAIVVAITVGVIYSQNGNNPQWELDYRQEKICWLAIPEPNGVIKSPLLWSFIVPVTIILISNVVMFITISIKVLWKNNQNLTSTKKVSSMKKIVSTLSVAVVFGITWILAYLMLVNDDSIRIVFSYIFCLFNTTQGLQIFILYTVRTKVFQSEASKVLMLLSSIGRRKSLPSVTRPRLRVKMYNFLRSLPTLHERFRLLETSPSTEEITLSESDNAKESI

SEQ ID NO: 1283 - protein, 848 aa, Homo sapiens; identical to SEQ ID NO: 1282

SEQ ID NO: 1284 - protein, 848 aa, Homo sapiens; identical to SEQ ID NO: 1282

SEQ ID NO: 1285 - protein, 848 aa, Homo sapiens; identical to SEQ ID NO: 1282

SEQ ID NO: 1286 - protein, 131 aa, Homo sapiens
MSCVPWKGDKAKSESLELPQAAPPQIYHEKQRRELCALHALNNVFQDSNAFTRDTLQEIFQSPPGPSRSGQAERGSGETAPEDEGNSGPETAELGQGKGAQVGTGRVPEARVSRPPQSKPEVSDQDEKHRG

SEQ ID NO: 1287 - protein, 872 aa, Homo sapiens
MFSALKKLVGSDQAPGRDKNIPAGLQSMNQALQRRFAKGVQYNMKIVIRGDRNTGKTALWHRLQGRPFVEEYIPTQEIQVTSIHWSYKTTDDIVKVEVWDVVDKGKCKKRGDGLKMENDPQEAESEMALDAEFLDVYKNCNGVVMMFDITKQWTFNYILRELPKVPTHVPVCVLGNYRDMGEHRVILPDDVRDFIDNLDRPPGSSYFRYAESSMKNSFGLKYLHKFFNIPFLQLQRETLLRQLETNQLDMDATLEELSVQQETEDQNYGIFLEMMEARSRGHASPLAANGQSPSPGSQSPVVPAGAVSTGSSSPGTPQPAPQLPLNAAPPSSVPPVPPSEALPPPACPSAPAPRRSIISRLFGTSPATEAAPPPPEPVPAAEGPATVQSVEDFVPDDRLDRSFLEDTTPARDEKKVGAKAAQQDSDSDGEALGGNPMVAGFQDDVDLEDQPRGSPPLPAGPVPSQDITLSSEEEAEVAAPTKGPAPAPQQCSEPETKWSSIPASKPRRGTAPTRTAAPPWPGGVSVRTGPEKRSSTRPPAEMEPGKGEQASSSESDPEGPIAAQMLSFVMDDPDFESEGSDTQRRADDFPVRDDPSDVTDEDEGPAEPPPPPKLPLPAFRLKNDSDLFGLGLEEAGPKESSEEGKEGKTPSKEKKKKKKKGKEEEEKAAKKKSKHKKSKDKEEGKEERRRRQQRPPRSRERTAADELEAFLGGGAPGGRQAPAAAMADSGTAGGAALAAPAPGPGSGGPGPRVYFQSPPGAAGEGPGGADDEGPVRRQGKVTVKYDRKELRKRLNLEEWILEQLTRLYDCQEEEIPELEIDVDELLDMESDDARAARVKELLVDCYKPTEAFISGLLDKIRGMQKLSTPQKK

SEQ ID NO: 1288 - protein, 873 aa, Homo sapiens
MFSALKKLVGSDQAPGRDKNIPAGLQSMNQALQRRFAKGVQYNMKIVIRGDRNTGKTALWHRLQGRPFVEEYIPTQEIQVTSIHWSYKTTDDIVKVEVWDVVDKGKCKKRGDGLKMENDPQEAESEMALDAEFLDVYKNCNGVVMMFDITKQWTFNYILRELPKVPTHVPVCVLGNYRDMGEHRVILPDDVRDFIDNLDSRPPGSSYFRYAESSMKNSFGLKYLHKFFNIPFLQLQRETLLRQLETNQLDMDATLEELSVQQETEDQNYGIFLEMMEARSRGHASPLAANGQSPSPGSQSPVVPAGAVSTGSSSPGTPQPAPQLPLNAAPPSSVPPVPPSEALPPPACPSAPAPRRSIISRLFGTSPATEAAPPPPEPVPAAEGPATVQSVEDFVPDDRLDRSFLEDTTPARDEKKVGAKAAQQDSDSDGEALGGNPMVAGFQDDVDLEDQPRGSPPLPAGPVPSQDITLSSEEEAEVAAPTKGPAPAPQQCSEPETKWSSIPASKPRRGTAPTRTAAPPWPGGVSVRTGPEKRSSTRPPAEMEPGKGEQASSSESDPEGPIAAQMLSFVMDDPDFESEGSDTQRRADDFPVRDDPSDVTDEDEGPAEPPPPPKLPLPAFRLKNDSDLFGLGLEEAGPKESSEEGKEGKTPSKEKKKKKKKGKEEEEKAAKKKSKHKKSKDKEEGKEERRRRQQRPPRSRERTAADELEAFLGGGAPGGRQAPAAAMADSGTAGGAALAAPAPGPGSGGPGPRVYFQSPPGAAGEGPGGADDEGPVRRQGKVTVKYDRKELRKRLNLEEWILEQLTRLYDCQEEEIPELEIDVDELLDMESDDARAARVKELLVDCYKPTEAFISGLLDKIRGMQKLSTPQKK

SEQ ID NO: 1289 - protein, 1603 aa, Homo sapiens
MSSSFFNPSFAFSSHFDPVTDVELKRLKDAFKRTCGLSYYMGQHCFIREVLGDGVPPKVAEVIYCSFGGTSKGLHFNNLIVGLVLLTRGKDEEKAKYIFSLFSSESGNYVIREEMERMLHVVDGKVPDTLRKCFSEGEKVNYEKFRNWLFLNKDAFTFSRWLLSGGVYVTLTDDSDTPTFYQTLAGVTHLEESDIIDLEKRYWLLKAQSRTGRFDLETFGPLVSPPIRPSLSEGLFNAFDENRDNHIDFKEISCGLSACCRGPLAERQKFCFKVFDVDRDGVLSRVELRDMVVALLEVWKDNRTDDIPELHMDLSDIVEGILNAHDTTKMGHLTLEDYQIWSVKNVLANEFLNLLFQVCHIVLGLRPATPEEEGQIIRGWLERESRYGLQAGHNWFIISMQWWQQWKEYVKYDANPVVIEPSSVLNGGKYSFGTAAHPMEQVEDRIGSSLSYVNTTEEKFSDNISTASEASETAGSGFLYSATPGADVCFARQHNTSDNNNQCLLGANGNILLHLNPQKPGAIDNQPLVTQEPVKATSLTLEGGRLKRTPQLIHGRDYEMVPEPVWRALYHWYGANLALPRPVIKNSKTDIPELELFPRYLLFLRQQPATRTQQSNIWVNMGNVPSPNAPLKRVLAYTGCFSRMQTIKEIHEYLSQRLRIKEEDMRLWLYNSENYLTLLDDEDHKLEYLKIQDEQHLVIEVRNKDMSWPEEMSFIANSSKIDRHKVPTEKGATGLSNLGNTCFMNSSIQCVSNTQPLTQYFISGRHLYELNRTNPIGMKGHMAKCYGDLVQELWSGTQKNVAPLKLRWTIAKYAPRFNGFQQQDSQELLAFLLDGLHEDLNRVHEKPYVELKDSDGRPDWEVAAEAWDNHLRRNRSIVVDLFHGQLRSQVKCKTCGHISVRFDPFNFLSLPLPMDSYMHLEITVIKLDGTTPVRYGLRLNMDEKYTGLKKQLSDLCGLNSEQILLAEVHGSNIKNFPQDNQKVRLSVSGFLCAFEIPVPVSPISASSPTQTDFSSSPSTNEMFTLTTNGDLPRPIFIPNGMPNTVVPCGTEKNFTNGMVNGHMPSLPDSPFTGYIIAVHRKMMRTELYFLSSQKNRPSLFGMPLIVPCTVHTRKKDLYDAVWIQVSRLASPLPPQEASNHAQDCDDSMGYQYPFTLRVVQKDGNSCAWCPWYRFCRGCKIDCGEDRAFIGNAYIAVDWDPTALHLRYQTSQERVVDEHESVEQSRRAQAEPINLDSCLRAFTSEEELGENEMYYCSKCKTHCLATKKLDLWRLPPILIIHLKRFQFVNGRWIKSQKIVKFPRESFDPSAFLVPRDPALCQHKPLTPQGDELSEPRILAREVKKVDAQSSAGEEDVLLSKSPSSLSANIISSPKGSPSSSRKSGTSCPSSKNSSPNSSPRTLGRSKGRLRLPQIGSKNKLSSSKENLDASKENGAGQICELADALSRGHVLGGSQPELVTPQDHEVALANGFLYEHEACGNGYSNGQLGNHSEEDSTDDQREDTRIKPIYNLYAISCHSGILGGGHYVTYAKNPNCKWYCYNDSSCKELHPDEIDTDSAYILFYEQQGIDYAQFLPKTDGKKMADTSSMDEDFESDYKKYCVLQ

SEQ ID NO: 1290 - protein, 1603 aa, Homo sapiens; identical to SEQ ID NO: 1289

SEQ ID NO: 1291 - protein, 871 aa, Homo sapiens
MPRLKESRSHESLLSPSSAVEALDLSMEEEVVIKPVHSSILGQDYCFEVTTSSGSKCFSCRSAAERDKWMENLRRAVHPNKDNSRRVEHILKLWVIEAKDLPAKKKYLCELCLDDVLYARTTGKLKTDNVFWGEHFEFHNLPPLRTVTVHLYRETDKKKKKERNSYLGLVSLPAASVAGRQFVEKWYPVVTPNPKGGKGPGPMIRIKARYQTITILPMEMYKEFAEHITNHYLGLCAALEPILSAKTKEEMASALVHILQSTGKVKDFLTDLMMSEVDRCGDNEHLIFRENTLATKAIEEYLKLVGQKYLQDALGEFIKALYESDENCEVDPSKCSAADLPEHQGNLKMCCELAFCKIINSYCVFPRELKEVFASWRQECSSRGRPDISERLISASLFLRFLCPAIMSPSLFNLLQEYPDDRTARTLTLIAKVTQNLANFAKFGSKEEYMSFMNQFLEHEWTNMQRFLLEISNPETLSNTAGFEGYIDLGRELSSLHSLLWEAVSQLEQSIVSKLGPLPRILRDVHTALSTPGSGQLPGTNDLASTPGSGSSSISAGLQKMVIENDLSGLIDFTRLPSPTPENKDLFFVTRSSGVQPSPARSSSYSEANEPDLQMANGGKSLSMVDLQDARTLDGEAGSPAGPDVLPTDGQAAAAQLVAGWPARATPVNLAGLATVRRAGQTPTTPGTSEGAPGRPQLLAPLSFQNPVYQMAAGLPLSPRGLGDSGSEGHSSLSSHSNSEELAAAAKLGSFSTAAEELARRPGELARRQMSLTEKGGQPTVPRQNSAGPQRRIDQPPPPPPPPWSWWWLWARWRSWLWRWLRWPWLSCLPSWRYPRGHCQPESPDSPQPANRPQHPEGEDRGARADQDPQQ

SEQ ID NO: 1292 - protein, 967 aa, Homo sapiens
MEPDSLLDQDDSYESPQERPGSRRSLPGSLSEKSPSMEPSAATPFRVTGFLSRRLKGSIKRTKSQPKLDRNHSFRHILPGFRSAAAAAADNERSHLMPRLKESRSHESLLSPSSAVEALDLSMEEEVVIKPVHSSILGQDYCFEVTTSSGSKCFSCRSAAERDKWMENLRRAVHPNKDNSRRVEHILKLWVIEAKDLPAKKKYLCELCLDDVLYARTTGKLKTDNVFWGEHFEFHNLPPLRTVTVHLYRETDKKKKKERNSYLGLVSLPAASVAGRQFVEKWYPVVTPNPKGGKGPGPMIRIKARYQTITILPMEMYKEFAEHITNHYLGLCAALEPILSAKTKEEMASALVHILQSTGKVKDFLTDLMMSEVDRCGDNEHLIFRENTLATKAIEEYLKLVGQKYLQDALGEFIKALYESDENCEVDPSKCSAADLPEHQGNLKMCCELAFCKIINSYCVFPRELKEVFASWRQECSSRGRPDISERLISASLFLRFLCPAIMSPSLFNLLQEYPDDRTARTLTLIAKVTQNLANFAKFGSKEEYMSFMNQFLEHEWTNMQRFLLEISNPETLSNTAGFEGYIDLGRELSSLHSLLWEAVSQLEQSIVSKLGPLPRILRDVHTALSTPGSGQLPGTNDLASTPGSGSSSISAGLQKMVIENDLSGLIDFTRLPSPTPENKDLFFVTRSSGVQPSPARSSSYSEANEPDLQMANGGKSLSMVDLQDARTLDGEAGSPAGPDVLPTDGQAAAAQLVAGWPARATPVNLAGLATVRRAGQTPTTPGTSEGAPGRPQLLAPLSFQNPVYQMAAGLPLSPRGLGDSGSEGHSSLSSHSNSEELAAAAKLGSFSTAAEELARRPGELARRQMSLTEKGGQPTVPRQNSAGPQRRIDQPPPPPPPPWSWWWLWARWRSWLWRWLRWPWLSCLPSWRYPRGHCQPESPDSPQPANRPQHPEGEDRGARADQDPQQ

SEQ ID NO: 1293 - protein, 585 aa, Homo sapiens
MASPPHQQLLHHHSTEVSCDSSGDSNSVRVKINPKQLSSNSHPKHCKYSISSSCSSSGDSGGVPRRVGGGGRLRRQKKLPQLFERASSRWWDPKFDSVNLEEACLERCFPQTQRRFRYALFYIGFACLLWSIYFAVHMRSRLIVMVAPALCFLLVCVGFFLFTFTKLYARHYAWTSLALTLLVFALTLAAQFQVLTPVSGRGDSSNLTATARPTDTCLSQVGSFSMCIEVLFLLYTVMHLPLYLSLCLGVAYSVLFETFGYHFRDEACFPSPGAGALHWELLSRGLLHGCIHAIGVHLFVMSQVRSRSTFLKVGQSIMHGKDLEVEKALKERMIHSVMPRIIADDLMKQGDEESENSVKRHATSSPKNRKKKSSIQKAPIAFRPFKMQQIEEVSILFADIVGFTKMSANKSAHALVGLLNDLFGRFDRLCEETKCEKISTLGDCYYCVAGCPEPRADHAYCCIEMGLGMIKAIEQFCQEKKEMVNMRVGVHTGTVLCGILGMRRFKFDVWSNDVNLANLMEQLGVAGKVHISEATAKYLDDRYEMEDGKVIERLGQSVVADQLKALPVPCPSRPAAEGASPASLL

SEQ ID NO: 1294 - protein, 762 aa, Homo sapiens
MFSVESLERAELCESLLTWIQTFNVDAPCQTVEDLTNGVVMAQVLQKIDPAYFDENWLNRIKTEVGDNWRLKISNLKKILKGILDYNHEILGQQINDFTLPDVNLIGEHSDAAELGRMLQLILGCAVNCEQKQEYIQAIMMMEESVQHVVMTAIQELMSKESPVSAGNDAYVDLDRQLKKTTEELNEALSAKEEIAQRCHELDMQVAALQEEKSSLLAENQVLMERLNQSDSIEDPNSPAGRRHLQLQTQLEQLQEETFRLEAAKDDYRIRCEELEKEISELRQQNDELTTLADEAQSLKDEIDVLRHSSDKVSKLEGQVESYKKKLEDLGDLRRQVKLLEEKNTMYMQNTVSLEEELRKANAARSQLETYKRQVVELQNRLSEESKKADKLDFEYKRLKEKVDSLQKEKDRLRTERDSLKETIEELRCVQAQEGQLTTQGLMPLGSQESSDSLAAEIVTPEIREKLIRLQHENKMLKLNQEGSDNEKIALLQSLLDDANLRKNELETENRLVNQRLLEVQSQVEELQKSLQDQGSKAEDSVLLKKKLEEHLHHRRVLVEWLRDPSQELEFIADILNQDAKNYHAWQHRQWVIQEFKLWDNELQYVDQLLKEDVRNNSVWNQRYFVISNTTGYNDRAVLEREVQYTLEMIKLVPHNESAWNYLKGILQDRGLSKYPNLLNQLLDLQPSHSSPYLIAFLVDIYEDMLENQCDNKEDILNKALELCEILAKEKDTIRKEYWRYIGRSLQSKHSTENDSPTNVQQ

SEQ ID NO: 1295 - protein, 762 aa, Homo sapiens; identical to SEQ ID NO: 1294

SEQ ID NO: 1296 - protein, 284 aa, Homo sapiens
MDRGEQGLLRTDPVPEEGEDVAATISATETLSEEEQEELRRELAKVEEEIQTLSQVLAAKEKHLAEIKRKLGINSLQELKQNIAKGWQDVTATSAYKKTSETLSQAGQKASAAFSSVGSVITKKLEDVKLQAFSHSFSIRSIQHSISMPAMRNSPTFKSFEEKVENLKGSPKNVESFASMLRHSPLTQMGPAKDKLVIGRIFHIVENDLYIDFGGKFHCVCRRPEVDGEKYQKGTRVRLRLLDLELTSRFLGATTDTTVLEANAVLLGIQESKDSRSKEEHHEK

SEQ ID NO: 1297 - protein, 261 aa, Homo sapiens
MDRGEQGLLRTDPVPEEGEDVAATISATETLSEEEQEELRRELAKVEEEIQTLSQVLAAKEKHLAEIKRKLGINSLQELKQNIAKGWQDVTATSAYKKTSETLSQAGQKASAAFSSVGSVITKKLEDVKNSPTFKSFEEKVENLKGSPKNVESFASMLRHSPLTQMGPAKDKLVIGRIFHIVENDLYIDFGGKFHCVCRRPEVDGEKYQKGTRVRLRLLDLELTSRFLGATTDTTVLEANAVLLGIQESKDSRSKEEHHEK

SEQ ID NO: 1298 - protein, 301 aa, Homo sapiens
MDCREMDLYEDYQSPFDFDAGVNKSYLYLSPSGNSSPPGSPTLQKFGLLRTDPVPEEGEDVAATISATETLSEEEQEELRRELAKVEEEIQTLSQVLAAKEKHLAEIKRKLGINSLQELKQNIAKGWQDVTATSAYKKTSETLSQAGQKASAAFSSVGSVITKKLEDVKNSPTFKSFEEKVENLKGSPKNVESFASMLRHSPLTQMGPAKDKLVIGRIFHIVENDLYIDFGGKFHCVCRRPEVDGEKYQKGTRVRLRLLDLELTSRFLGATTDTTVLEANAVLLGIQESKDSRSKEEHHEK

SEQ ID NO: 1299 - protein, 308 aa, Homo sapiens
MQPSSLLPLALCLLAAPASALVRIPLHKFTSIRRTMSEVGGSVEDLIAKGPVSKYSQAVPAVTEGPIPEVLKNYMDAQYYGEIGIGTPPQCFTVVFDTGSSNLWVPSIHCKLLDIACWIHHKYNSDKSSTYVKNGTSFDIHYGSGSLSGYLSQDTVSVPCQSASSASALGGVKVERQVFGEATKQPGITFIAAKFDGILGMAYPRISVNNVLPVFDNLMQQKLVDQNIFSFYLSRDPDAQPGGELMLGGTDSKYYKGSLSYLNVTRKAYWQVKCVKLDRPRFERVLGPCSEILKRNIQRYNSFISLTV

SEQ ID NO: 1300 - protein, 308 aa, Homo sapiens; identical to SEQ ID NO: 1299

SEQ ID NO: 1301 - protein, 308 aa, Homo sapiens; identical to SEQ ID NO: 1299

SEQ ID NO: 1302 - protein, 308 aa, Homo sapiens; identical to SEQ ID NO: 1299

SEQ ID NO: 1303 - protein, 308 aa, Homo sapiens; identical to SEQ ID NO: 1299

SEQ ID NO: 1304 - protein, 308 aa, Homo sapiens; identical to SEQ ID NO: 1299

SEQ ID NO: 1305 - protein, 2630 aa, Homo sapiens
MYNGIGLPTPRGSGTNGYVQRNLSLVRGRRGERPDYKGEEELRRLEAALVKRPNPDILDHERKRRVELRCLELEEMMEEQGYEEQQIQEKVATFRLMLLEKDVNPGGKEETPGQRPAVTETHQLAELNEKKNERLRAAFGISDSYVDGSSFDPQRRAREAKQPAPEPPKPYSLVRESSSSRSPTPKQKKKKKKKDRGRRSESSSPRRERKKSSKKKKHRSESESKKRKHRSPTPKSKRKSKDKKRKRSRSTTPAPKSRRAHRSTSADSASSSDTSRSRSRSAAAKTHTTALAGRSPSPASGRRGEGDAPFSEPGTTSTQRPSSPETATKQPSSPYEDKDKDKKEKSATRPSPSPERSSTGPEPPAPTPLLAERHGGSPQPLATTPLSQEPVNPPSEASPTRDRSPPKSPEKLPQSSSSESSPPSPQPTKVSRHASSSPESPKPAPAPGSHREISSSPTSKNRSHGRAKRDKSHSHTPSRRMGRSRSPATAKRGRSRSRTPTKRGHSRSRSPQWRRSRSAQRWGRSRSPQRRGRSRSPQRPGWSRSRNTQRRGRSRSARRGRSHSRSPATRGRSRSRTPARRGRSRSRTPARRRSRSRTPTRRRSRSRTPARRGRSRSRTPARRRSRTRSPVRRRSRSRSPARRSGRSRSRTPARRGRSRSRTPARRGRSRSRTPARRSGRSRSRTPARRGRSRSRTPRRGRSRSRSLVRRGRSHSRTPQRRGRSGSSSERKNKSRTSQRRSRSNSSPEMKKSRISSRRSRSLSSPRSKAKSRLSLRRSLSGSSPCPKQKSQTPPRRSRSGSSQPKAKSRTPPRRSRSSSSPPPKQKSKTPSRQSHSSSSPHPKVKSGTPPRQGSITSPQANEQSVTPQRRSCFESSPDPELKSRTPSRHSCSGSSPPRVKSSTPPRQSPSRSSSPQPKVKAIISPRQRSHSGSSSPSPSRVTSRTTPRRSRSVSPCSNVESRLLPRYSHSGSSSPDTKVKPETPPRQSHSGSISPYPKVKAQTPPGPSLSGSKSPCPQEKSKDSLVQSCPGSLSLCAGVKSSTPPGESYFGVSSLQLKGQSQTSPDHRSDTSSPEVRQSHSESPSLQSKSQTSPKGGRSRSSSPVTELASRSPIRQDRGEFSASPMLKSGMSPEQSRFQSDSSSYPTVDSNSLLGQSRLETAESKEKMALPPQEDATASPPRQKDKFSPFPVQDRPESSLVFKDTLRTPPRERSGAGSSPETKEQNSALPTSSQDEELMEVVEKSEEPAGQILSHLSSELKEMSTSNFESSPEVEERPAVSLTLDQSQSQASLEAVEVPSMASSWGGPHFSPEHKELSNSPLRENSFGSPLEFRNSGPLGTEMNTGFSSEVKEDLNGPFLNQLETDPSLDMKEQSTRSSGHSSSELSPDAVEKAGMSSNQSISSPVLDAVPRTPSRERSSSASSPEMKDGLPRTPSRRSRSGSSPGLRDGSGTPSRHSLSGSSPGMKDIPRTPSRGRSECDSSPEPKALPQTPRPRSRSPSSPELNNKCLTPQRERSGSESSVDQKTVARTPLGQRSRSGSSQELDVKPSASPQERSESDSSPDSKAKTRTPLRQRSRSGSSPEVDSKSRLSPRRSRSGSSPEVKDKPRAAPRAQSGSDSSPEPKAPAPRALPRRSRSGSSSKGRGPSPEGSSSTESSPEHPPKSRTARRGSRSSPEPKTKSRTPPRRRSSRSSPELTRKARLSRRSRSASSSPETRSRTPPRHRRSPSVSSPEPAEKSRSSRRRRSASSPRTKTTSRRGRSPSPKPRGLQRSRSRSRREKTRTTRRRDRSGSSQSTSRRRQRSRSRSRVTRRRRGGSGYHSRSPARQESSRTSSRRRRGRSRTPPTSRKRSRSRTSPAPWKRSRSRASPATHRRSRSRTPLISRRRSRSRTSPVSRRRSRSRTSVTRRRSRSRASPVSRRRSRSRTPPVTRRRSRSRTPTTRRRSRSRTPPVTRRRSRSRTPPVTRRRSRSRTSPITRRRSRSRTSPVTRRRSRSRTSPVTRRRSRSRTSPVTRRRSRSRTPPAIRRRSRSRTPLLPRKRSRSRSPLAIRRRSRSRTPRTARGKRSLTRSPPAIRRRSASGSSSDRSRSATPPATRNHSGSRTPPVALNSSRMSCFSRPSMSPTPLDRCRSPGMLEPLGSSRTPMSVLQQAGGSMMDGPGPRIPDHQRTSVPENHAQSRIALALTAISLGTARPPPSMSAAGLAARMSQVPAPVPLMSLRTAPAANLASRIPAASAAAMNLASARTPAIPTAVNLADSRTPAAAAAMNLASPRTAVAPSAVNLADPRTPTAPAVNLAGARTPAALAALSLTGSGTPPTAANYPSSSRTPQAPASANLVGPRSAHATAPVNIAGSRTAAALAPASLTSARMAPALSGANLTSPRVPLSAYERVSGRTSPPLLDRARSRTPPSAPSQSRMTSERAPSPSSRMGQAPSQSLLPPAQDQPRSPVPSAFSDQSRCLIAQTTPVAGSQSLSSGAVATTTSSAGDHNGMLSVPAPGVPHSDVGEPPASTGAQQPSALAALQPAKERRSSSSSSSSSSSSSSSSSSSSSSSSSGSSSSDSEGSSLPVQPEVALKRVPSPTPAPKEAVREGRPPEPTPAKRKRRSSSSSSSSSSSSSSSSSSSSSSSS

SEQ ID NO: 1306 - protein, 614 aa, Homo sapiens
MALVLGSLLLLGLCGNSFSGGQPSSTDAPKAWNYELPATNYETQDSHKAGPIGILFELVHIFLYVVQPRDFPEDTLRKFLQKAYESKIDYDKPETVILGLKIVYYEAGIILCCVLGLLFIILMPLVGYFFCMCRCCNKCGGEMHQRQKENGPFLRKCFAISLLVICIIISIGIFYGFVANHQVRTRIKRSRKLADSNFKDLRTLLNETPEQIKYILAQYNTTKDKAFTDLNSINSVLGGGILDRLRPNIIPVLDEIKSMATAIKETKEALENMNSTLKSLHQQSTQLSSSLTSVKTSLRSSLNDPLCLVHPSSETCNSIRLSLSQLNSNPELRQLPPVDAELDNVNNVLRTDLDGLVQQGYQSLNDIPDRVQRQTTTVVAGIKRVLNSIGSDIDNVTQRLPIQDILSAFSVYVNNTESYIHRNLPTLEEYDSYWWLGGLVICSLLTLIVIFYYLGLLCGVCGYDRHATPTTRGCVSNTGGVFLMVLISLKVLNSIVLLGKSCQYVKEAKMEEKLSNPPATCTPGKPSSKSQNKCKPSQGLSTEENLSASITKQPIHQKENIIPLLVTSNSDQFLTTPDGDEKDITQDNSELKHRSSKKDLLEIDRFTICGNRID

SEQ ID NO: 1307 - protein, 614 aa, Homo sapiens; identical to SEQ ID NO: 1306

SEQ ID NO: 1308 - protein, 614 aa, Homo sapiens; identical to SEQ ID NO: 1306

SEQ ID NO: 1309 - protein, 605 aa, Homo sapiens
MALVLGSLLLLGLCGNSFSGGQPSSTDAPKAWNYELPATNYETQDSHKAGPIGILFELVHIFLYVVQPRDFPEDTLRKFLQKAYESKIDYDKIVYYEAGIILCCVLGLLFIILMPLVGYFFCMCRCCNKCGGEMHQRQKENGPFLRKCFAISLLVICIIISIGIFYGFVANHQVRTRIKRSRKLADSNFKDLRTLLNETPEQIKYILAQYNTTKDKAFTDLNSINSVLGGGILDRLRPNIIPVLDEIKSMATAIKETKEALENMNSTLKSLHQQSTQLSSSLTSVKTSLRSSLNDPLCLVHPSSETCNSIRLSLSQLNSNPELRQLPPVDAELDNVNNVLRTDLDGLVQQGYQSLNDIPDRVQRQTTTVVAGIKRVLNSIGSDIDNVTQRLPIQDILSAFSVYVNNTESYIHRNLPTLEEYDSYWWLGGLVICSLLTLIVIFYYLGLLCGVCGYDRHATPTTRGCVSNTGGVFLMVLISLKVLNSIVLLGKSCQYVKEAKMEEKLSNPPATCTPGKPSSKSQNKCKPSQGLSTEENLSASITKQPIHQKENIIPLLVTSNSDQFLTTPDGDEKDITQDNSELKHRSSKKDLLEIDRFTICGNRID

SEQ ID NO: 1310 - protein, 605 aa, Homo sapiens; identical to SEQ ID NO: 1309

SEQ ID NO: 1311 - protein, 605 aa, Homo sapiens; identical to SEQ ID NO: 1309

SEQ ID NO: 1312 - protein, 605 aa, Homo sapiens; identical to SEQ ID NO: 1309

SEQ ID NO: 1313 - protein, 66 aa, Homo sapiens
MPRKKAAAAAWEEPSSGNGTARAGPRKRGGPAGRKRERPERWPPPLLLLAPSLHQPEALCFPSWIC

SEQ ID NO: 1314 - protein, 512 aa, Homo sapiens
MGRVIRGQRKGAGSVFRAHVKHRKGAARLRAVDFAERHGYIKGIVKDIIHDPGRGAPLAKVVFRDPYRFKKRTELFIAAEGIHTGQFVYCGKKAQLNIGNVLPVGTMPEGTIVCCLEEKPGDRGKLARASGNYATVISHNPETKKTRVKLPSGSKKVISSANRAVVGVVATSSKNLEPLFETYLSVLRKQLDTLGNDKGRLQSELKTMQDSVEDFKTKYEEEINKRTAAENDFVVLKKDVDAAYLNKVELEAKVDSLNDEINFLKVLYDAELSQMQTHVSDTSVVLSMDNNRNLDLDSIIAEVRAQYEEIAQRSKAEAEALYQTKVQQLQISVDQHGDNLKNTKSEIAELNRMIQRLRAEIENIKKQCQTLQVSVADAEQRGENALKDAHSKRVELEAALQQAKEELARMLREYQELMSVKLALDIEIATYRKLLEGEEYRMSGECQSAVSISVVSGSTSTGGISGGLGSGSGFGLSSGFGSGSGSGFGFGGSVSGSSSSKIISTTTLNKRR

SEQ ID NO: 1315 - protein, 512 aa, Homo sapiens; identical to SEQ ID NO: 1314

SEQ ID NO: 1316 - protein, 594 aa, Homo sapiens
MEEEGVKEAGEKPRGAQMVDKAGWIKKSSGGLLGFWKDRYLLLCQAQLLVYENEDDQKCVETVELGSYEKCQDLRALLKRKHRFILLRSPGNKVSDIKFQAPTGEEKESWIKALNEGINRGKNKAFDEVKVDKSCALEHVTRDRVRGGQRRRPPTRVHLKEFGMNALLLSAWFGHLRILQILVNSGAKIHCESKDGLTLLHCAAQKGHVPVLAFIMEDLEDVALDHVDKLGRTAFHRAAEHGQLDALDFLVGSGCDHNVKDKEGNTALHLAAGRGHMAVLQRLVDIGLDLEEQNAEGLTALHSAAGGSHPDCVQLLLRAGSTVNALTQKNLSCLHYAALSGSEDVSRVLIHAGGCANVVDHQGASPLHLAVRHNFPALVRLLINSDSDVNAVDNRQQTPLHLAAEHAWQDIADMLLIAGVDLNLRDKQGKTALAVAVRSNHVSLVDMIIKADRFYRWEKDHPSDPSGKSLSFKQDHRQETQQLRSVLWRLASRYLQPREWKKLAYSWEFTEAHVDAIEQQWTGTRSYQEHGHRMLLIWLHGVATAGENPSKALFEGLVAIGRRDLAGWSTMARSQLTATSASRVQMILVPQPPE

SEQ ID NO: 1317 - protein, 544 aa, Homo sapiens
MEEEDDQKCVETVELGSYEKCQDLRALLKRKHRFILLRSPGNKVSDIKFQAPTGEEKESWIKALNEGINRGKNKAFDEVKVDKSCALEHVTRDRVRGGQRRRPPTRVHLKEFGMNALLLSAWFGHLRILQILVNSGAKIHCESKDGLTLLHCAAQKGHVPVLAFIMEDLEDVALDHVDKLGRTAFHRAAEHGQLDALDFLVGSGCDHNVKDKEGNTALHLAAGRGHMAVLQRLVDIGLDLEEQNAEGLTALHSAAGGSHPDCVQLLLRAGSTVNALTQKNLSCLHYAALSGSEDVSRVLIHAGGCANVVDHQGASPLHLAVRHNFPALVRLLINSDSDVNAVDNRQQTPLHLAAEHAWQDIADMLLIAGVDLNLRDKQGKTALAVAVRSNHVSLVDMIIKADRFYRWEKDHPSDPSGKSLSFKQDHRQETQQLRSVLWRLASRYLQPREWKKLAYSWEFTEAHVDAIEQQWTGTRSYQEHGHRMLLIWLHGVATAGENPSKALFEGLVAIGRRDLAGWSTMARSQLTATSASRVQMILVPQPPE

SEQ ID NO: 1318 - protein, 594 aa, Homo sapiens; identical to SEQ ID NO: 1316

SEQ ID NO: 1319 - protein, 544 aa, Homo sapiens; identical to SEQ ID NO: 1317

SEQ ID NO: 1320 - protein, 815 aa, Homo sapiens
MGSQTLQILRQGVWAALSGGWYYDPHQATFVNALHLYLWLFLLGLPFTLYMALPSTMIIVAVYCPVIAAVFIVLKMVNYRLHRALDAGEVVDRTANEFTDQRTKAEQGNCSTRRKDSNGPSDPGGGIEMSEFIREATPPVGCSSRNSYAGLDPSNQIGSGSSRLGTAATIKGDTDTAKTSDDISLSLGQSSSLCKEGSEEQDLAADRKLFRLVSNDSFISIQPSLSSCGQDLPRDFSDKVNLPSHNHHHHVDQSLSSACDTEVASLVPLHSHSYRKDHRPRGVPRTSSSAVAFPDTSLNDFPLYQQRRGLDPVSELESSKPLSGSKESLVENSGLSGEFQLAGDLKINTSQPPTKSGKSKPLKAEKSMDSLRSLSTRSSGSTESYCSGTDRDTNSTVSSYKSEQTSSTHIESILSEHEESPKAGTKSGRKKECCAGPEEKNSCASDKRTSSEKIAMEASTNSGVHEAKDPTPSDEMHNQRGLSTSASEEANKNPHANEFTSQGDRPPGNTAENKEEKSDKSAVSVDSKVRKDVGGKQKEGDVRPKSSSVIHRTASAHKSGRRRTGKKRASSFDSSRHRDYVCFRGVSGTKPHSAIFCHDEDSSDQSDLSRASSVQSAHQFSSDSSSSTTSHSCQSPEGRYSALKTKHTHKERGTDSEHTHKAHLVPEGTSKKRATRRTSSTNSAKTRARVLSLDSGTVACLNDSNRLMAPESIKPLTTSKSDLEAKEGEVLDELSLLGRASQLETVTRSRNSLPNQVAFPEGEEQDAVSGAAQASEEAVSFRRERSTFRRQAVRRRHNAGSNPTPPTLLIGSPLR

SEQ ID NO: 1321 - protein, 815 aa, Homo sapiens; identical to SEQ ID NO: 1320

SEQ ID NO: 1322 - protein, 129 aa, Homo sapiens
MRAWIFFLLCLAGRALAAPQQEALPDETEVVEETVAEVTEVSVGANPVQVEVGEFDDGAEETEEEVVAENPCQNHHCKHGKVCELDENNTPMCVCQDPTSCPAPIGEFEKVCSNDNKTFDNSVGVLKLT

SEQ ID NO: 1323 - protein, 851 aa, Homo sapiens
MSIHFSSPVFTSRSAAFSGRGAQVRLSSARPGGLGSSSLYGLGASRPRVAVRSAYGGPVGAGIREVTINQSLLAPLRLDADPSLQRVRQEESEQIKTLNNKFASFIDKVRFLEQQNKLLETKWTLLQEQKSAKSSRLPDIFEAQIAGLRGQLEALQVDGGRLEAELRSMQDVVEDFKNKYEDEINHRTAAENEFVVLKKDVDAAYMSKVELEAKVDALNDEINFLRTLNETELTELQSQISDTSVVLSMDNSRSLDLDGIIAEVKAQYEEMAKCSRAEAEAWYQTKFETLQAQAGKHGDDLRNTRNEISEMNRAIQRLQAEIDNIKNQRAKLEAAIAEAEERGELALKDARAKQEELEAALQRGKQDMARQLREYQELMSVKLALDIEIATYRKLLEGEESRLLLSSPSPVCLPPAAATMTTSIRQFTSSSSIKGSSGLGGGSSRTSCRLSGGLGAGSCRLGSAGGLGSTLGGSSYSSCYSFGSGGGYGSSFGGVDGLLAGGEKATMQNLNDRLASYLDKVRALEEANTELEVKIRDWYQRQAPGPARDYSQYYRTIEELQNKILTATVDNANILLQIDNARLAADDFRTKFETEQALRLSVEADINGLRRVLDELTLARADLEMQIENLKEELAYLKKNHEEEMNALRGQVGGEINVEMDAAPGVDLSRILNEMRDQYEKMAEKNRKDAEDWFFSKTEELNREVATNSELVQSGKSEISELRRTMQALEIELQSQLSMKASLEGNLAETENRYCVQLSQIQGLIGSVEEQLAQLRCEMEQQNQEYKILLDVKTRLEQEIATYRRLLEGEDAHLTQYKKEPVTTRQVRTIVEEVQDGKVISSREQVHQTTR

SEQ ID NO: 1324 - protein, 297 aa, Homo sapiens
MGKVKVGVNGFGRIGRLVTRAAFNSGKVDIVAINDPFIDLNYMVYMFQYDSTHGKFHGTVKAENGKLVINGNPITIFQERDPSKIKWGDAGAEYVVESTGVFTTMEKAGAHLQGGAKRVIISAPSADAPMFVMGVNHEKYDNSLKIISNASCTTNCLAPLAKVIHDNFGIVEGLMTTVHAITATQKTVDGPSGKLWRDGRGALQNIIPASTGAAKAVGKVIPELNGKLTGMAFRVPTANVSVVDLTCRLEKPAKYDDIKKVVKQASEGGGRRRRLRSKKGTPTRVEVLITPRNSITI

SEQ ID NO: 1325 - protein, 297 aa, Homo sapiens; identical to SEQ ID NO: 1324

SEQ ID NO: 1326 - protein, 297 aa, Homo sapiens; identical to SEQ ID NO: 1324

SEQ ID NO: 1327 - protein, 297 aa, Homo sapiens; identical to SEQ ID NO: 1324

SEQ ID NO: 1328 - protein, 297 aa, Homo sapiens; identical to SEQ ID NO: 1324

SEQ ID NO: 1329 - protein, 325 aa, Homo sapiens
MSEEIITPVYCTGVSAQVQKQRARELGLGRHENAIKYLGQDYEQLRVRCLQSGTLFRDEAFPPVPQSLGYKDLGPNSSKTYGIKWKRPTELLSNPQFIVDGATRTDICQGALGDCWLLAAIASLTLNDTLLHRVVPHGQSFQNGYAGIFHFQLWQFGEWVDVVVDDLLPIKDGKLVFVHSAEGNEFWSALLEKAYAKVNGSYEALSGGSTSEGFEDFTGGVTEWYELRKAPSDLYQIILKALERGSLLGCSIDISSVLDMEAITFKKLVKGHAYSVTGAKQVLELDSIRSHHWCIQGCSAVTGENLLPGIDWLLDDISSRIFTAD

SEQ ID NO: 1330 - protein, 703 aa, Homo sapiens
MSILKIHAREIFDSRGNPTVEVDLFTSKGLFRAAVPSGASTGIYEALELRDNDKTRYMGKGVSKAVEHINKTIAPALVSKKLNVTEQEKIDKLMIEMDGTENKSKFGANAILGVSLAVCKAGAVEKGVPLYRHIADLAGNSEVILPVPAFNVINGGSHAGNKLAMQEFMILPVGAANFREAMRIGAEVYHNLKNVIKEKYGKDATNVGDEGGFAPNILENKEGLELLKTAIGKAGYTDKVVIGMDVAASEFFRSGKYDLDFKSPDDPSRYISPDQLADLYKSFIKDYPVVSIEDPFDQDDWGAWQKFTASAGIQVVGDDLTVTNPKRIAKAVNEKSCNCLLLKVNQIGSVTESLQACKLAQANGWGVMVGVMVGMGQKDSYVGDEAQSKRGILTLKYPIEHGIVTNWDDMEKIWHHTFYNELRVAPEEHPVLLTEAPLNPKANREKMTQIMFETFNTPAMYVAIQAVLSLYASGRTTGIVMDSGDGVTHTVPIYEGYALPHAILRLDLAGRDLTDYLMKILTERGYSFTTTAEREIVRDIKEKLCYVALDFEQEMATAASSSSLEKSYELPDGQVITIGNERFRCPEALFQPSFLGMESCGIHETTFNSIMKCDVDIRKDLYANTVLSGGTTMYPGIADRMQKEITALAPSTMKIKIIAPPERKYSVWIGGSILASLSTFQQMWISKQEYDESGPSIVHRKCF

SEQ ID NO: 1331 - protein, 1669 aa, Homo sapiens
MFSFVDLRLLLLLAATALLTHGQEEGQVEGQDEDIPPITCVQNGLRYHDRDVWKPEPCRICVCDNGKVLCDDVICDETKNCPGAEVPEGECCPVCPDGSESPTDQETTGVEGPKGDTGPRGPRGPAGPPGRDGIPGQPGLPGPPGPPGPPGPPGLGGNFAPQLSYGYDEKSTGGISVPGPMGPSGPRGLPGPPGAPGPQGFQGPPGEPGEPGASGPMGPRGPPGPPGKNGDDGEAGKPGRPGERGPPGPQGARGLPGTAGLPGMKGHRGFSGLDGAKGDAGPAGPKGEPGSPGENGAPGQMGPRGLPGERGRPGAPGPAGARGNDGATGAAGPPGPTGPAGPPGFPGAVGAKGEAGPQGPRGSEGPQGVRGEPGPPGPAGAAGPAGNPGADGQPGAKGANGAPGIAGAPGFPGARGPSGPQGPGGPPGPKGNSGEPGAPGSKGDTGAKGEPGPVGVQGPPGPAGEEGKRGARGEPGPTGLPGPPGERGGPGSRGFPGADGVAGPKGPAGERGSPGPAGPKGSPGEAGRPGEAGLPGAKGLTGSPGSPGPDGKTGPPGPAGQDGRPGPPGPPGARGQAGVMGFPGPKGAAGEPGKAGERGVPGPPGAVGPAGKDGEAGAQGPPGPAGPAGERGEQGPAGSPGFQGLPGPAGPPGEAGKPGEQGVPGDLGAPGPSGARGERGFPGERGVQGPPGPAGPRGANGAPGNDGAKGDAGAPGAPGSQGAPGLQGMPGERGAAGLPGPKGDRGDAGPKGADGSPGKDGVRGLTGPIGPPGPAGAPGDKGESGPSGPAGPTGARGAPGDRGEPGPPGPAGFAGPPGADGQPGAKGEPGDAGAKGDAGPPGPAGPAGPPGPIGNVGAPGAKGARGSAGPPGATGFPGAAGRVGPPGPSGNAGPPGPPGPAGKEGGKGPRGETGPAGRPGEVGPPGPPGPAGEKGSPGADGPAGAPGTPGPQGIAGQRGVVGLPGQRGERGFPGLPGPSGEPGKQGPSGASGERGPPGPMGPPGLAGPPGESGREGAPGAEGSPGRDGSPGAKGDRGETGPAGPPGAPGAPGAPGPVGPAGKSGDRGETGPAGPTGPVGPVGARGPAGPQGPRGDKGETGEQGDRGIKGHRGFSGLQGPPGPPGSPGEQGPSGASGPAGPRGPPGSAGAPGKDGLNGLPGPIGPPGPRGRTGDAGPVGPPGPPGPPGPPGPPSAGFDFSFLPQPPQEKAHDGGRYYRADDANVVRDRDLEVDTTLKSLSQQIENIRSPEGSRKNPARTCRDLKMCHSDWKSGEYWIDPNQGCNLDAIKVFCNMETGETCVYPTQPSVAQKNWYISKNPKDKRHVWFGESMTDGFQFEYGGQGSDGGQSPIVPGPFPHRAWACSPARGRGGGQCGDTRCSCLPGWLARSLLGTQRSAGSTQRDLRAAVPSPDSRIPGARRPAAGAAMKKLMVVLSLIAAAWAEEQNKLVHGGPCDKTSHPYQAALYTSGHLLCGGVLIHPLWVLTAAHCKKPNLQVFLGKHNLRQRESSQEQSSVVRAVIHPDYDAASHDQDIMLLRLARPAKLSELIQPLPLERDCSANTTSCHILGWGKTADGDFPDTIQCAYIHLVSREECEHAYPGQITQNMLCAGDEKYGKDSCQGDSGGPLVCGDHLRGLVSWGNIPCGSKEKPGVYTNVCRYTNWIQKTIQAK

SEQ ID NO: 1332 - protein, 693 aa, Homo sapiens
METPSQRRATRSGAQASSTPLSPTRITRLQEKEDLQELNDRLAVYIDRVRSLETENAGLRLRITESEEVVSREVSGIKAAYEAELGDARKTLDSVAKERARLQLELSKVREEFKELKARNTKKEGDLIAAQARLKDLEALLNSKEAALSTALSEKRTLEGELHDLRGQVAKLEAALGEAKKQLQDEMLRRVDAENRLQTMKEELDFQKNIYSEELRETKRRHETRLVEIDNGKQREFESRLADALQELRAQHEDQVEQYKKELEKTYSAKLDNARQSAERNSNLVGAAHEELQQSRIRIDSLSAQLSQLQKQLAAKEAKLRDLEDSLARERDTSRRLLAEKEREMAEMRARMQQQLDEYQELLDIKLALDMEIHAYRKLLEGEEERLRLSPSPTSQRSRGRASSHSSQTQGGGSVTKKRKLESTESRSSFSQHARTSGRVAVEEVDEEGKFVRLRNKSNEDQSMGNWQIKRQNGDDPLLTYRFPPKFTLKAGQVVTIWAAGAGATHSPPTDLVWKAQNTWGCGNSLRTALINSTGEGSHCSSSGDPAEYNLRSRTVLCGTCGQPADKASASGSGAQVGGPISSGSSASSVTVTRSYRSVGGSGGGSFGDNLVTRSYLLGNSSPRTQSPQNCSIMYLGPASTVFVVSSFLPTNHELPDSSELFHRRGGSRQQPGQFVPAGLLHLPLSGLLFRPR

SEQ ID NO: 1333 - protein, 723 aa, Homo sapiens
METPSQRRATRSGAQASSTPLSPTRITRLQEKEDLQELNDRLAVYIDRVRSLETENAGLRLRITESEEVVSREVSGIKAAYEAELGDARKTLDSVAKERARLQLELSKVREEFKELKARNTKKEGDLIAAQARLKDLEALLNSKEAALSTALSEKRTLEGELHDLRGQVAKLEAALGEAKKQLQDEMLRRVDAENRLQTMKEELDFQKNIYSEELRETKRRHETRLVEIDNGKQREFESRLADALQELRAQHEDQVEQYKKELEKTYSAKLDNARQSAERNSNLVGAAHEELQQSRIRIDSLSAQLSQLQKQLAAKEAKLRDLEDSLARERDTSRRLLAEKEREMAEMRARMQQQLDEYQELLDIKLALDMEIHAYRKLLEGEEERLRLSPSPTSQRSRGRASSHSSQTQGGGSVTKKRKLESTESRSSFSQHARTSGRVAVEEVDEEGKFVRLRNKSNEDQSMGNWQIKRQNGDDPLLTYRFPPKFTLKAGQVVTIWAAGAGATHSPPTDLVWKAQNTWGCGNSLRTALINSTGEEVAMRKLVRSVTVVEDDEDEDGDDLLHHHHGSHCSSSGDPAEYNLRSRTVLCGTCGQPADKASASGSGAQVGGPISSGSSASSVTVTRSYRSVGGSGGGSFGDNLVTRSYLLGNSSPRTQSPQNCSIMYLGPASTVFVVSSFLPTNHELPDSSELFHRRGGSRQQPGQFVPAGLLHLPLSGLLFRPR

SEQ ID NO: 1334 - protein, 245 aa, Homo sapiens
MPYQYPALTPEQKKELSDIAHRIVAPGKGILAADESTGSIAKRLQSIGTENTEENRRFYRQLLLTADDRVNPCIGGVILFHETLYQKADDGRPFPQVIKSKGGVVGIKVDKGVVPLAGTNGETTTQGLDGLSERCAQYKKDGADFAKWRCVLKIGEHTPSALAIMENANVLARYASICQQNGIVPIVEPEILPDGDHDLKRCQYVTEKVLAAVYKALRWWSRGPDLCYPSVHLQSPGGLLPEICG

SEQ ID NO: 1335 - protein, 245 aa, Homo sapiens; identical to SEQ ID NO: 1334

SEQ ID NO: 1336 - protein, 245 aa, Homo sapiens; identical to SEQ ID NO: 1334

SEQ ID NO: 1337 - protein, 245 aa, Homo sapiens; identical to SEQ ID NO: 1334

SEQ ID NO: 1338 - protein, 245 aa, Homo sapiens; identical to SEQ ID NO: 1334

SEQ ID NO: 1339 - protein, 245 aa, Homo sapiens; identical to SEQ ID NO: 1334

SEQ ID NO: 1340 - protein, 245 aa, Homo sapiens; identical to SEQ ID NO: 1334

SEQ ID NO: 1341 - protein, 245 aa, Homo sapiens; identical to SEQ ID NO: 1334

SEQ ID NO: 1342 - protein, 86 aa, Homo sapiens
MSMDVTFLGTGAAYPSPTRGASAVVLRCEGECWLFDCGEGTQTQLMKSQLKAGYPEYMSNNFPCNVSCCFSLFPKDQNCFRNWRHI

SEQ ID NO: 1343 - protein, 362 aa, Homo sapiens
MLLSVPLLLGLLGLAVAEPAVYFKEQFLDGDGWTSRWIESKHKSDFGKFVLSSGKFYGDEEKDKGLQTSQDARFYALSASFEPFSNKGQTLVVQFTVKHEQNIDCGGGYVKLFPNSLDQTDMHGDSEYNIMFGPDICGPGTKKVHVIFNYKGKNVLINKDIRCKDDEFTHLYTLIVRPDNTYEVKIDNSQVESGSLEDDWDFLPPKKIKDPDASKPEDWDERAKIDDPTDSKPEDWDKPEHIPDPDAKKPEDWDEEMDGEWEPPVIQNPEYKGEWKPRQIDNPDYKGTWIHPEIDNPEYSPDPSIYAYDNFGVLGLDLWQVKSGTIFDNFLITNDEAYAEEFGNETWGVTKAAEKQMKDCLF

SEQ ID NO: 1344 - protein, 362 aa, Homo sapiens; identical to SEQ ID NO: 1343

SEQ ID NO: 1345 - protein, 362 aa, Homo sapiens; identical to SEQ ID NO: 1343

SEQ ID NO: 1346 - protein, 362 aa, Homo sapiens; identical to SEQ ID NO: 1343

SEQ ID NO: 1347 - protein, 362 aa, Homo sapiens; identical to SEQ ID NO: 1343

SEQ ID NO: 1348 - protein, 353 aa, Homo sapiens
MMLGTEGGEGFVVKVRGLPWSCSADEVQRFFSDCKIQNGAQGIRFIYTREGRPSGEAFVELESEDEVKLALKKDRETMGHRYVEVFKSNNVEMDWVLKHTGPNSPDTANDGFVRLRGLPFGCSKEEIVQFFSGLEIVPNGITLPVDFQGRSTGEAFVQFASQEIAEKALKKHKERIGHRYIEIFKSSRAEVRTHYDPPRKLMAMQRPGPYDRPGAGRGYNSIGRGAGFERMRRGAYGGGYGGYDDYNGYNDGYGFGSDRFGRDLNYCFSGMSDHRYGDGGSTFQSTTGHCVHMRGLPYRATENDIYNFFSPLNPVRVHIEIGPDGRVITSPLPSLLVVIAAIFIGFFLGKFIL

SEQ ID NO: 1349 - protein, 353 aa, Homo sapiens; identical to SEQ ID NO: 1348

SEQ ID NO: 1350 - protein, 794 aa, Homo sapiens
MAPWPELGDAQPNPDKYLEGAAGQQPTAPDKSKETNKTDNTEAPVTKIELLPSYSTATLIDEPTEVDDPWNLPTLQDSGIKWSERDTKGKILCFFQGIGRLILLLGFLYFFVCSLDILSSAFQLVGGKMAGQFFSNSSIMSNPLLGLVIGVLVTVLVQSSSTSTSIVVSMVSSSLLTVRAAIPIIMGANIGTSITNTIVALMQVGDRSEFRRAFAGATVHDFFNWLSVLVLLPVEVATHYLEIITQLIVESFHFKNGEDAPDLLKVITKPFTKLIVQLDKKVISQIAMNDEKAKNKSLVKIWCKTFTNKTQINVTVPSTANCTSPSLCWTDGIQNWTMKNVTYKENIAKCQHIFVNFHLPDLAVGTILLILSLLVLCGCLIMIVKILGSVLKGQVATVIKKTINTDFPFPFAWLTGYLAILVGAGMTFIVQSSSVFTSALTPLIGIGVITIERAYPLTLGSNIGTTTTAILAALASPGNALRSSLQIALCHFFFNISGILLWYPIPFTRLPIRMAKGLGNISAKYRWFAVFYLIIFFFLIPLTVFGLSLAGWRVLVGVGVPVVFIIILVLCLRLLQSRCPRVLPKKLQNWNFLPLWMRSLKPWDAVVSKFTGCFQMRCCCCCRVCCRACCLLCDCPKCCRCSKCCEDLEEAQEGQDVPVKAPETFDNITISRRFRCPEALFQPSFLGMESCGIHETTFNSIMKCDVDIRKDLYANTVLSGGTTMYPGIADRMQKEITALAPSTMKIKIIAPPERKYSVWIGGSILASLSTFQQMWISKQEYDESGPSIVHRKCF

SEQ ID NO: 1351 - protein, 644 aa, Homo sapiens
MGDVLSTHLDDARRQHIAEKTGKILTEFLQFYEDQYGVALFNSMRHEIEGTGLPQAQLLWRKVPLDERIVFSGNLFQHQEDSKKWRNRFSLVPHNYGLVLYENKAAYERQVPPRAVINSAGYKILTSVDQYLELIGNSLPGTTAKSGSAPILKCPTQFPLILWHPYARHYYFCMMTEAEQDKWQAVLQDCIRHCNNGIPEDSKVEGPAFTDAIRMYRQSKELYGTWEMLCGNEVQILSNLVMEELGPELKAELGPRLKGKPQERQRQWIQISDAVYHMVYEQAKARFEEVLSKVQQVQPAMQAVIRTDMDQIITSKEHLASKIRAFILPKAEVCVRNHVQPYIPSILEALMVPTSQGFTEVRDVFFKEVTDMNLNVINEGGIDKLGEYMEKLSRLAYHPLKMQSCYEKMESLRLDGLQQRFDVSSTSVFKQRAQIHMREQMDNAVYTFETLLHQELGKGPTKEELCKSIQRVLERVLKKYDYDSSSVRKRFFREALLQISIPFLLKKLAPTCKSELPRFQELIFEDFARFILVENTYEEVVLQTVMKDILQAVKEAAVQRKHNLYRDSMVMHNSDPNLHLLAEGAPIDWGEEYSNSGGGGSPSPVLVGGDPLLIPNWKPHIPGDCRATPRPPTPVQRGPQWHNP

SEQ ID NO: 1352 - protein, 614 aa, Homo sapiens
MGDVLSTHLDDARRQHIAEKTGKILTEFLQFYEDQYGVALFNSMRHEIEGTGLPQAQLLWRKVPLDERIVFSGNLFQHQEDSKKWRNRFSLVPHNYGLVLYENKAAYERQVPPRAVINSAGYKILTSVDQYLELIGNSLPGTTAKSGSAPILKCPTQFPLILWHPYARHYYFCMMTEAEQDKWQAVLQDCIRHCNNGIPEDSKVEGPAFTDAIRMYRQSKELYGTWEMLCGNEVQILSNLVMEELGPELKAELGPRLKGKPQERQRQWIQISDAVYHMVYEQAKARFEEVLSKVQQVQPAMQAVIRTDMDQIITSKEHLASKIRAFILPKAEVCVRNHVQPYIPSILEALMVPTSQGFTEVRDVFFKEVTDMNLNVINEGGIDKLGEYMEKLSRLAYHPLKMQSCYEKMESLRLDGLQQRFDVSSTSVFKQRAQIHMREQMDNAVYTFETLLHQELGKGPTKEELCKSIQRVLERVLKKYDYDSSSVRKRFFREALLQISIPFLLKKLAPTCKSELPRFQELIFEDFARFILVENTYEEVVLQTVMKDILQAVKEAAVQRKHNLYRDSMVMHNSDPNLHLLAEGAPIDWGEEYSNSGGGGSPSPVQRGPQWHNP

SEQ ID NO: 1353 - protein, 614 aa, Homo sapiens; identical to SEQ ID NO: 1352

SEQ ID NO: 1354 - protein, 631 aa, Homo sapiens
MGWMGEKTGKILTEFLQFYEDQYGVALFNSMRHEIEGTGLPQAQLLWRKVPLDERIVFSGNLFQHQEDSKKWRNRFSLVPHNYGLVLYENKAAYERQVPPRAVINSAGYKILTSVDQYLELIGNSLPGTTAKSGSAPILKCPTQFPLILWHPYARHYYFCMMTEAEQDKWQAVLQDCIRHCNNGIPEDSKVEGPAFTDAIRMYRQSKELYGTWEMLCGNEVQILSNLVMEELGPELKAELGPRLKGKPQERQRQWIQISDAVYHMVYEQAKARFEEVLSKVQQVQPAMQAVIRTDMDQIITSKEHLASKIRAFILPKAEVCVRNHVQPYIPSILEALMVPTSQGFTEVRDVFFKEVTDMNLNVINEGGIDKLGEYMEKLSRLAYHPLKMQSCYEKMESLRLDGLQQRFDVSSTSVFKQRAQIHMREQMDNAVYTFETLLHQELGKGPTKEELCKSIQRVLERVLKKYDYDSSSVRKRFFREALLQISIPFLLKKLAPTCKSELPRFQELIFEDFARFILVENTYEEVVLQTVMKDILQAVKEAAVQRKHNLYRDSMVMHNSDPNLHLLAEGAPIDWGEEYSNSGGGGSPSPVLVGGDPLLIPNWKPHIPGDCRATPRPPTPVQRGPQWHNP

SEQ ID NO: 1355 - protein, 601 aa, Homo sapiens
MGWMGEKTGKILTEFLQFYEDQYGVALFNSMRHEIEGTGLPQAQLLWRKVPLDERIVFSGNLFQHQEDSKKWRNRFSLVPHNYGLVLYENKAAYERQVPPRAVINSAGYKILTSVDQYLELIGNSLPGTTAKSGSAPILKCPTQFPLILWHPYARHYYFCMMTEAEQDKWQAVLQDCIRHCNNGIPEDSKVEGPAFTDAIRMYRQSKELYGTWEMLCGNEVQILSNLVMEELGPELKAELGPRLKGKPQERQRQWIQISDAVYHMVYEQAKARFEEVLSKVQQVQPAMQAVIRTDMDQIITSKEHLASKIRAFILPKAEVCVRNHVQPYIPSILEALMVPTSQGFTEVRDVFFKEVTDMNLNVINEGGIDKLGEYMEKLSRLAYHPLKMQSCYEKMESLRLDGLQQRFDVSSTSVFKQRAQIHMREQMDNAVYTFETLLHQELGKGPTKEELCKSIQRVLERVLKKYDYDSSSVRKRFFREALLQISIPFLLKKLAPTCKSELPRFQELIFEDFARFILVENTYEEVVLQTVMKDILQAVKEAAVQRKHNLYRDSMVMHNSDPNLHLLAEGAPIDWGEEYSNSGGGGSPSPVQRGPQWHNP

SEQ ID NO: 1356 - protein, 601 aa, Homo sapiens; identical to SEQ ID NO: 1355

SEQ ID NO: 1357 - protein, 132 aa, Homo sapiens
MPPKKGGDGIKPPPIIGRFGTSLKIGIVGLPNVGKSTFFNVLTNSQASAENFPFCTIDPNESRVPVPDERFDFLCQYHKPASKIPAFLNVVDIAGLVKGAHNGQGLGNAFLSHISACDGIFHLTQQQRGAAG

SEQ ID NO: 1358 - protein, 153 aa, Homo sapiens
MNVGTAHSEVNPNTRVMNSRGIWLSYVLAIGLLHIVLLSIPFVSVPVVWTLTNLIHNMGMYIFLHTVKGTPFETPDQGKARLLTHWEQMDYGVQFTASRKFLTITPIVLYFLTSFYTKYDQIHFVLNTVSLMSVLIPKLPQLHGVRIFGINKY

SEQ ID NO: 1359 - protein, 1059 aa, Homo sapiens
MEKLHGHVSAHPDILSLENRCLAMLPDLQPLEKLHQHVSTHSDILSLKNQCLATLPDLKTMEKPHGYVSAHPDILSLENQCLATLSDLKTMEKPHGHVSAHPDILSLENRCLATLSSLKSTVSASPLFQSLQISHMTQADLYRVNNSNCLLSEPPSWRAQHFSKGLDLSTCPIALKSISATETAQEATLGRWFDSEEKKGAETQMPSYSLSLGEEEEVEDLAVKLTSGDSESHPEPTDHVLQEKKMALLSLLCSTLVSEVNMNNTSDPTLAAIFEICRELALLEPEFILKASLYARQQLNVRNVANNILAIAAFLPACRPHLRRYFCAIVQLPSDWIQVAELYQSLAEGDKNKLVPLPACLRTAMTDKFAQFDEYQLAKYNPRKHRAKRHPRRPPRSPGMEPPFSHRCFPRYIGFLREEQRKFEKAGDTVSEKKNPPRFTLKKLVQRLHIHKPAQHVQALLGYRYPSNLQLFSRSRLPGPWDSSRAGKRMKLSRPETWERELSLRGNKASVWEELIENGKLPFMAMLRNLCNLLRVGISSRHHELILQRLQHAKSVIHSRQFPFRFLNAHDAIDALEAQLRNQALPFPSNITLMRRILTRNEKNRPRRRFLCHLSRQQLRMAMRIPVLYEQLKREKLRVHKARQWKYDGEMLNRYRQALETAVNLSVKHSLPLLPGRTVLVYLTDANADRLCPKSNPQGPPLNYALLLIGMMITRAEQVDVVLCGGDTLKTAVLKAEEGILKTAIKLQAQVQEFDENDGWSLNTFGKYLLSLAGQRVPVDRVILLGQSMDDGMINVAKQLYWQRVNSKCLFVGILLRRVQYLSTDLNPNDVTLSGCTDAILKFIAEHGASHLLEHVGQMDKIFKIPPPPGKTGVQSLRPLEEDTPSPLAPVSQQGLFWESEATMALEKSLVRLLLLVLILLVLGWVQPSLGKESRAKKFQRQHMDSDSSPSSSSTYCNQMMRRRNMTQGRCKPVNTFVHEPLVDVQNVCFQEKVTCKNGQGNCYKSNSSMHITDCRLTNGSRYPNCAYRTSPKERHIIVACEGSPYVPVHFDASVEDST

SEQ ID NO: 1360 - protein, 1059 aa, Homo sapiens; identical to SEQ ID NO: 1359

SEQ ID NO: 1361 - protein, 1059 aa, Homo sapiens; identical to SEQ ID NO: 1359

SEQ ID NO: 1362 - protein, 1059 aa, Homo sapiens; identical to SEQ ID NO: 1359

SEQ ID NO: 1363 - protein, 500 aa, Homo sapiens
MGKVKVGVNGFGRIGRLVTRAAFNSGKVDIVAINDPFIDLNYMVYMFQYDSTHGKFHGTVKAENGKLVINGNPITIFQERDPSKIKWGDAGAEYVVESTGVFTTMEKAGAHLQGGAKRVIISAPSADAPMFVMGVNHEKYDNSLKIISNASCTTNCLAPLAKVIHDNFGIVEGLMTTVHAITATQKTVDGPSGKLWRDGRGALQNIIPASTGAAKAVGKVIPELNGKLTGMAFRVPTANVSVVDLTCRLEKPAKYDDIKKVVKQASEGPLKGILGYTEHQVVSSDFNSDTHSSTFDAGAGIALNDHFVKLISWYDNEFGYSGYSFTTTAEREIVRDIKEKLCYVALDFEQEMATAASSSSLEKSYELPDGQVITIGNERFRCPEALFQPSFLGMESCGIHETTFNSIMKCDVDIRKDLYANTVLSGGTTMYPGIADRMQKEITALAPSTMKIKIIAPPERKYSVWIGGSILASLSTFQQMWISKQEYDESGPSIVHRKCF

SEQ ID NO: 1364 - protein, 235 aa, Homo sapiens
MVFRRFVEVGRVAYVSFGPHAGKLVAIVDVIDQNRALVDGPCTQVRRQAMPFKCMQLTDFILKFPHSAHQKYVRQAWQKADINTKWAATRWAKKIEARERKAKMTDFDRFKVMKAKKMRNRIIKNEVKKLQKAALLKASPKKAPGTKGTAAAAAAAAAAKVPAKKITVAAILARSSSSSSSSSSSSSSSTRIRCGSPSRNHTQVAALSSSVISPPHHRPRSPRKPAAHARSILPC

SEQ ID NO: 1365 - protein, 235 aa, Homo sapiens; identical to SEQ ID NO: 1364

SEQ ID NO: 1366 - protein, 121 aa, Homo sapiens
MPKRKVAYPVLRARHGVHAGRCHDDRHLGAPEHPVGQRAAAAPPAQDPGGWASQDALHCPRNGCAPALPGALHPHRLPPHGARVALLLLQPLSETQRGGQRLDPFTGSPGRPLAILGLCRG

SEQ ID NO: 1367 - protein, 121 aa, Homo sapiens; identical to SEQ ID NO: 1366

SEQ ID NO: 1368 - protein, 414 aa, Homo sapiens
MVFRRFVEVGRVAYVSFGPHAGKLVAIVDVIDQNRALVDGPCTQVRRQAMPFKCMQLTDFILKFPHSAHQKYVRQAWQKADINTKWAATRWAKKIEARERKAKMTDFDRFKVMKAKKMRNRIIKNEVKKLQKAALLKASPKKAPGTKGTAAAAAAAAAATTAAAAAAAAAAAAAATAAAATDDDDLSGASSTDPGPGPVPSTDQSCGQADAGTPHQNAEAETADAPAAPTATGPVCAPAANSPSASADLAAAAAAEPPAHDGHGPKAWCPADGHHRGQPPGGPAHPGSHFSAAGARADADPGTPASPGGLGEASGGVRPGSCGLLTGSHHPAHERRGDQRGDRSATEGSRTDRGGPARAHAAAAEAEAAGRPAAEGHPAPGCTGPGSRPAEDHRTADHHPWRAAEGCLRRAAGP

SEQ ID NO: 1369 - protein, 414 aa, Homo sapiens; identical to SEQ ID NO: 1368

SEQ ID NO: 1370 - protein, 233 aa, Homo sapiens
GNHFDQYEEGHLEIEQASLDKPIESDNIGHRLLQKHGWKLGQGLGKSLQVSSPARRRAKSSQHLLTKNVVIESDLYTHQPLELLPHRGDRRDPGDRRRFGRLQTARPPTAHPAKASARPVGISEPKTSNLCGNRAYGKSLIPPVPRISVKTSASASLEATAMGTEKGAVLMRGSRHLKKMTEEYPALPQGAEASLPLTGSASCGVPGILRKMWTRHKKKSEYVGATNSAFEAD

SEQ ID NO: 1371 - protein, 273 aa, Homo sapiens
MSSAAADHWAWLLVLSFVFGCNVLRILLPSFSSFMSRVLQKDAEQESQMRAEIQDMKQELSTVNMMDEFARYARLERKINKMTDKLKTHVKARTAQLAKIKWVISVAFYVLQIRKKQQEVVGFLEANKIDFKELDIAGDEDNRRWMRENVPGEKKPQNGIPLPPQIFNEEQYCGDFDSFFSAKEENIIYSFLGLAPPPDSKGSEKAEEGGETEAQKEGSEDVGNLPEAQEKNEEEGETATEETEEIAMEGAEGEAEEEEETAEGEEPGEDEDS

SEQ ID NO: 1372 - protein, 273 aa, Homo sapiens; identical to SEQ ID NO: 1371

SEQ ID NO: 1373 - protein, 239 aa, Homo sapiens
MSRVLQKDAEQESQMRAEIQDMKQELSTVNMMDEFARYARLERKINKMTDKLKTHVKARTAQLAKIKWVISVAFYVLQIRKKQQEVVGFLEANKIDFKELDIAGDEDNRRWMRENVPGEKKPQNGIPLPPQIFNEEQYCGDFDSFFSAKEENIIYSFLGLAPPPDSKGSEKAEEGGETEAQKEGSEDVGNLPEAQEKNEEEGETATEETEEIAMEGAEGEAEEEEETAEGEEPGEDEDS

SEQ ID NO: 1374 - protein, 239 aa, Homo sapiens; identical to SEQ ID NO: 1373

SEQ ID NO: 1375 - protein, 273 aa, Homo sapiens; identical to SEQ ID NO: 1371

SEQ ID NO: 1376 - protein, 273 aa, Homo sapiens; identical to SEQ ID NO: 1371

SEQ ID NO: 1377 - protein, 239 aa, Homo sapiens; identical to SEQ ID NO: 1373

SEQ ID NO: 1378 - protein, 239 aa, Homo sapiens; identical to SEQ ID NO: 1373

SEQ ID NO: 1379 - protein, 273 aa, Homo sapiens; identical to SEQ ID NO: 1371

SEQ ID NO: 1380 - protein, 273 aa, Homo sapiens; identical to SEQ ID NO: 1371

SEQ ID NO: 1381 - protein, 239 aa, Homo sapiens; identical to SEQ ID NO: 1373

SEQ ID NO: 1382 - protein, 239 aa, Homo sapiens; identical to SEQ ID NO: 1373

SEQ ID NO: 1383 - protein, 1062 aa, Homo sapiens
MGPGPSRAPRAPRLMLCALALMVAAGGCVVSAFNLDTRFLVVKEAGNPGSLFGYSVALHRQTERQQRYLLLAGAPRELAVPDGYTNRTGAVYLCPLTAHKDDCERMNITVKNDPGHHIIEDMWLGVTVASQGPAGRVLVCAHRYTQVLWSGSEDQRRMVGKCYVRGNDLELDSSDDWQTYHNEMCNSNTDYLETGMCQLGTSGGFTQNTVYFGAPGAYNWKGNSYMIQRKEWDLSEYSYKDPEDQGNLYIGYTMQVGSFILHPKNITIVTGAPRHRHMGAVFLLSQEAGGDLRRRQVLEGSQVGAYFGSAIALADLNNDGWQDLLVGAPYYFERKEEVGGAIYVFMNQAGTSFPAHPSLLLHGPSGSAFGLSVASIGDINQDGFQDIAVGAPFEGLGKVYIYHSSSKGLLRQPQQVIHGEKLGLPGLATFGYSLSGQMDVDENFYPDLLVGSLSDHIVLLRARPVINIVHKTLVPRPAVLDPALCTATSCVQVELCFAYNQSAGNPNYRRNITLAYTLEADRDRRPPRLRFAGSESAVFHGFFSMPEMRCQKLELLLMDNLRDKLRPIIISMNYSLPLRMPDRPRLGLRSLDAYPILNQAQALENHTEVQFQKECGPDNKCESNLQMRAAFVSEQQQKLSRLQYSRDVRKLLLSINVTNTRTSERSGEDAHEALLTLVVPPALLLSSVRPPGACQANETIFCELGNPFKRNQRMELLIAFEVIGVTLHTRDLQVQLQLSTSSHQDNLWPMILTLLVDYTLQTSLSMVNHRLQSFFGGTVMGESGMKTVEDVGSPLKYEFQVGPMGEGLVGLGTLVLGLEWPYEVSNGKWLLYPTEITVHGNGSWPCRPPGDLINPLNLTLSDPGDRPSSPQRRRRQLDPGGGQGPPPVTLAAAKKAKSETVLTCATGRAHCVWLECPIPDAPVVTNVTVKARVWNSTFIEDYRDFDRVRVNGWATLFLRTSIPTINMENKTTWFSVDIDSELVEELPAEIELWLVLVAVGAGLLLLGLIILLLWKCDFFKRTRYYQIMPKYHAVRIREEERYPPPTRRRSQGSWERGHHPPG

SEQ ID NO: 1384 - protein, 1062 aa, Homo sapiens; identical to SEQ ID NO: 1383

SEQ ID NO: 1385 - protein, 75 aa, Homo sapiens
MFSPWKISMFLSVREDSVPTTASFRVSVRRPRLKCSGTIIARCSLDLPGLNDSPTSASRVAGTTGHCAWHHPGPL

SEQ ID NO: 1386 - protein, 75 aa, Homo sapiens; identical to SEQ ID NO: 1385

SEQ ID NO: 1387 - protein, 184 aa, Homo sapiens
MVFRRFVEVGRVAYVSFGPHAGKLVAIVDVIDQNRALVDGPCTQVRRQAMPFKCMQLTDFILKFPHSAHQKYVRQAWQKADINTKWAATRWAKKIEARERKAKMTDFDRFKVMKAKKMRNRIIKNEVKKLQKAALLKASPKKAPGTKGTAAAAAAAAAAKVPAKKITGYQQQQQQQQQQQHPQC

SEQ ID NO: 1388 - protein, 184 aa, Homo sapiens; identical to SEQ ID NO: 1387

SEQ ID NO: 1389 - protein, 184 aa, Homo sapiens; identical to SEQ ID NO: 1387

SEQ ID NO: 1390 - protein, 184 aa, Homo sapiens; identical to SEQ ID NO: 1387

SEQ ID NO: 1391 - protein, 395 aa, Homo sapiens
MEEEIAALVIDNGSGMCKAGFAGDDAPRAVFPSIVGRPRHQGVMVGMGQKDSYVGDEAQSKRGILTLKYPIEHGIVTNWDDMEKIWHHTFYNELRVAPEEHPVLLTEAPLNPKANREKMTQIMFETFNTPAMYVAIQAVLSLYASGRTTGIVMDSGDGVTHTVPIYEGYALPHAILRLDLAGRDLTDYLMKILTERGYSFTTTAEREIVRDIKEKLCYVALDFEQEMATAASSSSLEKSYELPDGQVITIGNERFRCPEALFQPSFLGMESCGIHETTFNSIMKCDVDIRKDLYANTVLSGGTTMYPGIADRMQKEITALAPSTMKIKIIAPPERKYSVWIGGEARMEVGGRAKQGDVARGDQGQRRDQEGTEDQEVQGSVARTRVAAWRSPSHV

SEQ ID NO: 1392 - protein, 144 aa, Homo sapiens
MAELDPFGAPAGAPGGPALGNGVAGAGEEDPAAAFLAQQESEIAGIENDEAFAILDGGAPGPCARCGWGPGAWTTATAWCLSSWSPRPPPPTGPLRTSARPAPAPAGQGGWTGPRPLRFPRAGPSVPLPCGPCSDSRAATGAAG

SEQ ID NO: 1393 - protein, 144 aa, Homo sapiens; identical to SEQ ID NO: 1392

SEQ ID NO: 1394 - protein, 144 aa, Homo sapiens; identical to SEQ ID NO: 1392

SEQ ID NO: 1395 - protein, 144 aa, Homo sapiens; identical to SEQ ID NO: 1392

SEQ ID NO: 1396 - protein, 144 aa, Homo sapiens; identical to SEQ ID NO: 1392

SEQ ID NO: 1397 - protein, 144 aa, Homo sapiens; identical to SEQ ID NO: 1392

SEQ ID NO: 1398 - protein, 586 aa, Homo sapiens [sequence omitted]

SEQ ID NO: 1399 - protein, 586 aa, Homo sapiens [sequence omitted]

SEQ ID NO: 1400 - protein, 586 aa, Homo sapiens [sequence omitted]

SEQ ID NO: 1401 - protein, 586 aa, Homo sapiens [sequence omitted]

SEQ ID NO: 1402 - protein, 586 aa, Homo sapiens [sequence omitted]

SEQ ID NO: 1403 - protein, 586 aa, Homo sapiens [sequence omitted]

SEQ ID NO: 1404 - protein, 357 aa, Homo sapiens
MAPPPPSPQLLLLAALARLLGPSEVMAGPAEEAGAHCPESLWPLPPQVSPRVTYTRVSPGQAEDVTFLYHPCAHPWLKLQLALLAYACMANPSLTPDFSLTQDRPLVLTAWGLALEMAWVEPAWAAHWLMRRRRRKQRKKKAWIYCESLSGPAPSEPTPGRGRLCRRGCVQALALAFALRSWRPPGTEVTSQGPRQPSSSGAKRRRLRAALGPQPTRSALRFPSASPGSLKAKQSMAGIPGRESNAPSVPTVSLLPGAPGGNASSRTEAQVPNGQGSPGGCVCSSQASPAPRAAAPPRAARGPTPRTEEAAWAAMALTFLLVLLTLATLCTRLHRNFRRGESIYWGPTADSQDTVAG

SEQ ID NO: 1405 - protein, 1349 aa, Homo sapiens
MFSFVDLRLLLLLAATALLTHGQEEGQVEGQDEDIPPITCVQNGLRYHDRDVWKPEPCRICVCDNGKVLCDDVICDETKNCPGAEVPEGECCPVCPDGSESPTDQETTGVEGPKGDTGPRGPRGPAGPPGRDGIPGQPGLPGPPGPPGPPGPPGLGGNFAPQLSYGYDEKSTGGISVPGPMGPSGPRGLPGPPGAPGPQGFQGPPGEPGEPGASGPMGPRGPPGPPGKNGDDGEAGKPGRPGERGPPGPQGARGLPGTAGLPGMKGHRGFSGLDGAKGDAGPAGPKGEPGSPGENGAPGQMGPRGLPGERGRPGAPGPAGARGNDGATGAAGPPGPTGPAGPPGFPGAVGAKGEAGPQGPRGSEGPQGVRGEPGPPGPAGAAGPAGNPGADGQPGAKGANGAPGIAGAPGFPGARGPSGPQGPGGPPGPKGNSGEPGAPGSKGDTGAKGEPGPVGVQGPPGPAGEEGKRGARGEPGPTGLPGPPGERGGPGSRGFPGADGVAGPKGPAGERGSPGPAGPKGSPGEAGRPGEAGLPGAKGLTGSPGSPGPDGKTGPPGPAGQDGRPGPPGPPGARGQAGVMGFPGPKGAAGEPGKAGERGVPGPPGAVGPAGKDGEAGAQGPPGPAGPAGERGEQGPAGSPGFQGLPGPAGPPGEAGKPGEQGVPGDLGAPGPSGARGERGFPGERGVQGPPGPAGPRGANGAPGNDGAKGDAGAPGAPGSQGAPGLQGMPGERGAAGLPGPKGDRGDAGPKGADGSPGKDGVRGLTGPIGPPGPAGAPGDKGESGPSGPAGPTGARGAPGDRGEPGPPGPAGFAGPPGADGQPGAKGEPGDAGAKGDAGPPGPAGPAGPPGPIGNVGAPGAKGARGSAGPPGATGFPGAAGRVGPPGPSGNAGPPGPPGPAGKEGGKGPRGETGPAGRPGEVGPPGPPGPAGEKGSPGADGPAGAPGTPGPQGIAGQRGVVGLPGQRGERGFPGLPGPSGEPGKQGPSGASGERGPPGPMGPPGLAGPPGESGREGAPGAEGSPGRDGSPGAKGDRGETGPAGPPGAPGAPGAPGPVGPAGKSGDRGETGPAGPTGPVGPVGARGPAGPQGPRGDKGETGEQGDRGIKGHRGFSGLQGPPGPPGSPGEQGPSGASGPAGPRGPPGSAGAPGKDGLNGLPGPIGPPGPRGRTGDAGPVGPPGPPGPPGPPGPPSAGFDFSFLPQPPQEKAHDGGRYYRADDANVVRDRDLEVDTTLKSLSQQIENIRSPEGSRKNPARTCRDLKMCHSDWKSGEYWIDPNQGCNLDAIKVFCNMETGETCVYPTQPSVAQKNWYISKNPKDKRHVWFGESMTDGFQFEYVIGSEHSFLQL

SEQ ID NO: 1406 - protein, 1347 aa, Homo sapiens
MFSFVDLRLLLLLAATALLTHGQEEGQVEGQDEDIPPITCVQNGLRYHDRDVWKPEPCRICVCDNGKVLCDDVICDETKNCPGAEVPEGECCPVCPDGSESPTDQETTGVEGPKGDTGPRGPRGPAGPPGRDGIPGQPGLPGPPGPPGPPGPPGLGGNFAPQLSYGYDEKSTGGISVPGPMGPSGPRGLPGPPGAPGPQGFQGPPGEPGEPGASGPMGPRGPPGPPGKNGDDGEAGKPGRPGERGPPGPQGARGLPGTAGLPGMKGHRGFSGLDGAKGDAGPAGPKGEPGSPGENGAPGQMGPRGLPGERGRPGAPGPAGARGNDGATGAAGPPGPTGPAGPPGFPGAVGAKGEAGPQGPRGSEGPQGVRGEPGPPGPAGAAGPAGNPGADGQPGAKGANGAPGIAGAPGFPGARGPSGPQGPGGPPGPKGNSGEPGAPGSKGDTGAKGEPGPVGVQGPPGPAGEEGKRGARGEPGPTGLPGPPGERGGPGSRGFPGADGVAGPKGPAGERGSPGPAGPKGSPGEAGRPGEAGLPGAKGLTGSPGSPGPDGKTGPPGPAGQDGRPGPPGPPGARGQAGVMGFPGPKGAAGEPGKAGERGVPGPPGAVGPAGKDGEAGAQGPPGPAGPAGERGEQGPAGSPGFQGLPGPAGPPGEAGKPGEQGVPGDLGAPGPSGARGERGFPGERGVQGPPGPAGPRGANGAPGNDGAKGDAGAPGAPGSQGAPGLQGMPGERGAAGLPGPKGDRGDAGPKGADGSPGKDGVRGLTGPIGPPGPAGAPGDKGESGPSGPAGPTGARGAPGDRGEPGPPGPAGFAGPPGADGQPGAKGEPGDAGAKGDAGPPGPAGPAGPPGPIGNVGAPGAKGARGSAGPPGATGFPGAAGRVGPPGPSGNAGPPGPPGPAGKEGGKGPRGETGPAGRPGEVGPPGPPGPAGEKGSPGADGPAGAPGTPGPQGIAGQRGVVGLPGQRGERGFPGLPGPSGEPGKQGPSGASGERGPPGPMGPPGLAGPPGESGREGAPGAEGSPGRDGSPGAKGDRGETGPAGPPGAPGAPGAPGPVGPAGKSGDRGETGPAGPTGPVGPVGARGPAGPQGPRGDKGETGEQGDRGIKGHRGFSGLQGPPGPPGSPGEQGPSGASGPAGPRGPPGSAGAPGKDGLNGLPGPIGPPGPRGRTGDAGPVGPPGPPGPPGPPGPPSAGFDFSFLPQPPQEKAHDGGRYYRADDANVVRDRDLEVDTTLKSLSQQIENIRSPEGSRKNPARTCRDLKMCHSDWKSGEYWIDPNQGCNLDAIKVFCNMETGETCVYPTQPSVAQKNWYISKNPKDKRHVWFGESMTDGFQFEYGGAARAYWE

SEQ ID NO: 1407 - protein, 883 aa, Homo sapiens
MLSFVDTRTLLLLAVTLCLATCQSLQEETVRKGPAGDRGPRGERGPPGPPGRDGEDGPTGPPGPPGPPGPPGLGGNFAAQYDGKGVGLGPGPMGLMGPRGPPGAAGAPGPQGFQGPAGEPGEPGQTGPAGARGPAGPPGKAGEDGHPGKPGRPGERGVVGPQGARGFPGTPGLPGFKGIRGHNGLDGLKGQPGAPGVKGEPGAPGENGTPGQTGARGLPGERGRVGAPGPAGARGSDGSVGPVGPAGPIGSAGPPGFPGAPGPKGEIGAVGNAGPAGPAGPRGEVGLPGLSGPVGPPGNPGANGLTGAKGAAGLPGVAGAPGLPGPRGIPGPVGAAGATGARGLVGEPGPAGSKGESGNKGEPGSAGPQGPPGPSGEEGKRGPNGEAGSAGPPGPPGLRGSPGSRGLPGADGRAGVMGPPGSRGASGPAGVRGPNGDAGRPGEPGLMGPRGLPGSPGNIGPAGKEGPVGLPGIDGRPGPIGPAGARGEPGNIGFPGPKGPTGDPGKNGDKGHAGLAGARGAPGPDGNNGAQGPPGPQGVQGGKGEQGPPGPPGFQGLPGPSGPAGEVGKPGERGLHGEFGLPGPAGPRGERGPPGESGAAGPTGPIGSRGPSGPPGPDGNKGEPGVVGAVGTAGPSGPSGLPGERGAAGIPGGKGEKGEPGLRGEIGNPGRDGARGAPGAVGAPGPAGATGDRGEAGAAGPAGPAGPRGSPGERGEVGPAGPNGFAGPAGAAGQPGAKGERGAKGPKGENGVVGPTGPVGAAGPAGPNGPPGPAGSRGDGGPPGMTGFPGAAGRTGPPGPSGISGPPGPPGPAGKEGLRGPRGDQGPVGRTGEVGAVGPPGFAGEKGPSGEAGTAGPPGTPGPQGLLGAPGILGLPGSAVPLP

SEQ ID NO: 1408 - protein, 5 aa, Homo sapiens
RCHAP

SEQ ID NO: 1409 - protein, 5 aa, Homo sapiens
RCHAP

SEQ ID NO: 1410 - protein, 360 aa, Homo sapiens
MSRPQLRRWRLVSSPPSGVPGLALLALLALLALRLAAGTDCPCPEPELCRPIRHHPDFEVFVFDVGQKTWKSYDWSQITTVATFGKYDSELMCYAHSKGARVVLKGDVSLKDIIDPAFRASWIAQKLNLAKTQYMDGINIDIEQEVNCLSPEYDALTALVKETTDSFHREIEGSQVTFDVAWSPKNIDRRCYNYTGIADACDFLFVMSYDEQSQIWSECIAAANAPYNQTLTGYNDYIKMSINPKKLVMGVPWYGYDYTCLNLSEDHVCTIAKVPFRGAPCSDAAGRQVPYKTIMKQINSSISGNLWDKDQRAPYYNYKVSQAAADLKQFCLQNAQHDPLLTGVSSSTNPFRPQKVCSFL

SEQ ID NO: 1411 - protein, 360 aa, Homo sapiens; identical to SEQ ID NO: 1410

SEQ ID NO: 1412 - protein, 360 aa, Homo sapiens; identical to SEQ ID NO: 1410

SEQ ID NO: 1413 - protein, 360 aa, Homo sapiens; identical to SEQ ID NO: 1410

SEQ ID NO: 1414 - protein, 360 aa, Homo sapiens; identical to SEQ ID NO: 1410

SEQ ID NO: 1415 - protein, 360 aa, Homo sapiens; identical to SEQ ID NO: 1410

SEQ ID NO: 1416 - protein, 360 aa, Homo sapiens; identical to SEQ ID NO: 1410

SEQ ID NO: 1417 - protein, 360 aa, Homo sapiens; identical to SEQ ID NO: 1410

SEQ ID NO: 1418 - protein, 360 aa, Homo sapiens; identical to SEQ ID NO: 1410

SEQ ID NO: 1419 - protein, 360 aa, Homo sapiens; identical to SEQ ID NO: 1410

SEQ ID NO: 1420 - protein, 360 aa, Homo sapiens; identical to SEQ ID NO: 1410

SEQ ID NO: 1421 - protein, 723 aa, Homo sapiens
MAGPRPSPWARLLLAALISVSLSGTLANRCKKAPVKSCTECVRVDKDCAYCTDEMFRDRRCNTQAELLAAGCQRESIVVMESSFQITEETQIDTTLRRSQMSPQGLRVRLRPGEERHFELEVFEPLESPVDLYILMDFSNSMSDDLDNLKKMGQNLARVLSQLTSDYTIGFGKFVDKVSVPQTDMRPEKLKEPWPNSDPPFSFKNVISLTEDVDEFRNKLQGERISGNLDAPEGGFDAILQTAVCTRDIGWRPDSTHLLVFSTESAFHYEADGANVLAGIMSRNDERCHLDTTGTYTQYRTQDYPSVPTLVRLLAKHNIIPIFAVTNYSYSYYEKLHTYFPVSSLGVLQEDSSNIVELLEEAFNRIRSNLDIRALDSPRGLRTEVTSKMFQKTRTGSFHIRRGEVGIYQVQLRALEHVDGTHVCQLPEDQKGNIHLKPSFSDGLKMDAGIICDVCTCELQKEVRSARCSFNGDFVCGQCVCSEGWSGQTCNCSTGSLSDIQPCLREGEDKPCSGRGECQCGHCVCYGEGRYEGQFCEYDNFQCPRTSGFLCNDRGRCSMGQCVCEPGWTGPSCDCPLSNATCIDSNGGICNGRGHCECGRCHCHQQSLYTDTICEINYSAIHPGLCEDLRSCVQCQAWGTGEKKGRTCEECNFKVKMVDELKRAAPPPPPPAGRAISTKVRLLALGPTVLRPLSGCRALSSGCLSSPGLQSPLLSQVELGMDA

SEQ ID NO: 1422 - protein, 723 aa, Homo sapiens; identical to SEQ ID NO: 1421

SEQ ID NO: 1423 - protein, 723 aa, Homo sapiens; identical to SEQ ID NO: 1421

SEQ ID NO: 1424 - protein, 208 aa, Homo sapiens
MSIHFSSPVFTSRSAAFSGRGAQVRLSSARPGGLGSSSLYGLGASRPRVAVRSAYGGPVGAGIREVTINQSLLAPLRLDADPSLQRVRQEESEQIKTLNNKFASFIDKVRFLEQQNKLLETKWTLLQEQKSAKSSRLPDIFEAQIAGLRGQLEALQVDGGRLEAELRSMQDVVEDFKNKYEDEINHRTAAENEFVVLKKGSHSQNHAG

SEQ ID NO: 1425 - protein, 208 aa, Homo sapiens; identical to SEQ ID NO: 1424

SEQ ID NO: 1426 - protein, 208 aa, Homo sapiens; identical to SEQ ID NO: 1424

SEQ ID NO: 1427 - protein, 235 aa, Homo sapiens
MSIHFSSPVFTSRSAAFSGRGAQVRLSSARPGGLGSSSLYGLGASRPRVAVRSAYGGPVGAGIREVTINQSLLAPLRLDADPSLQRVRQEESEQIKTLNNKFASFIDKVRFLEQQNKLLETKWTLLQEQKSAKSSRLPDIFEAQIAGLRGQLEALQVDGGRLEAELRSMQDVVEDFKNKYEDEINHRTAAENEFVVLKKDVDAAYMSTPPSIFPHYCSTSRPVAIEPTCMSINNS

SEQ ID NO: 1428 - protein, 235 aa, Homo sapiens; identical to SEQ ID NO: 1427

SEQ ID NO: 1429 - protein, 235 aa, Homo sapiens; identical to SEQ ID NO: 1427

SEQ ID NO: 1430 - protein, 3294 aa, Homo sapiens
MDGRDFGPQRSVHGPPPPLLSGLAMDSHRVGAATAGRLPASGLPGPLPPGKYMAGLNLHPHPGEAFLGSFVASGMGPSASSHGSPVPLPSDLSFRSPTPSNLPMVQLWAAHAHEGFSHLPSGLYPSYLHLNHLEPPSSGSPLLSQLGQPSIFDTQKGQGPGGDGFYLPTAGAPGSLHSHAPSARTPGGGHSSGAPAKGSSSRDGPAKERAGRGGEPPPLFGKKDPRARGEEASGPRGVVDLTQEARAEGRQDRGPPRLAERLSPFLAESKTKNAALQPSVLTMCNGGAGDVGLPALVAEAGRGGAKEAARQDEGARLLRRTETLLPGPRPCPSPLPPPPAPPKGPPAPPAATPAGVYTVFREQGREHRVVAPTFVPSVEAFDERPGPIQIASQARDARAREREAGRPGVLQAPPGSPRPLDRPEGLREKNSVIRSLKRPPPADAPTVRATRASPDPRAYVPAKELLKPEADPRPCERAPRGPAGPAAQQAAKLFGLEPGRPPPTGPEHKWKPFELGNFAATQMAVLAAQHHHSRAEEEAAVVAASSSKKAYLDPGAVLPRSAATCGRPVADMHSAAHGSGEASAMQSLIKYSGSFARDAVAVRPGGCGKKSPFGGLGTMKPEPAPTSAGASRAQARLPHSGGPAAGGGRQLKRDPERPESAKAFGREGSGAQGEAEVRHPPVGIAVAVARQKDSGGSGRLGPGLVDQERSLSLSNVKGHGRADEDCVDDRARHREERLLGARLDRDQEKLLRESKELADLARLHPTSCAPNGLNPNLMVTGGPALAGSGRWSADPAAHLATHPWLPRSGNASMWLAGHPYGLGPPSLHQGMAPAFPPGLGGSLPSAYQFVRDPQSGQLVVIPSDHLPHFAELMERATVPPLWPALYPPGRSPLHHAQQLQLFSQQHFLRQQEFLYLQQQAAQALELQRSAQLVQERLKAQEHRAEMEEKGSKRGLEAAGKAGLATAGPGLLPRKPPGLAAGPAGTYGKAVSPPPSPRASPVAALKAKVIQKLEDVSKPPAYAYPATPSSHPTSPPPASPPPTPGITRKEEAPENVVEKKDLELEKEAPSPFQALFSDIPPRYPFQALPPHYGRPYPFLLQPTAAADADGLAPDVPLPADGPERLALSPEDKPIRLSPSKITEPLREGPEEEPLAEREVKAEVEDMDEGPTELPPLESPLPLPAAEAMATPSPAGGCGGGLLEAQALSATGQSCAEPSECPDFVEGPEPRVDSPGRTEPCTAALDLGVQLTPETLVEAKEEPVEVPVAVPVVEAVPEEGLAQVAPSESQPTLEMSDCDVPAGEGQCPSLEPQEAVPVLGSTCFLEEASSDQFLPSLEDPLAGMNALAAAAELPQARPLPSPGAAGAQALEKLEAAESLVLEQSFLHGITLLSEIAELELERRSQEMGGAERALVARPSLESLLAAGSHMLREVLDGPVVDPLKNLRLPRELKPNKKYSWMRKKEERMYAMKSSLEDMDALELDFRMRLAEVQRQYKEKQRELVKLQRRRDSEDRREEPHRSLARRGPGRPRKRTHAPSALSPPRKRGKSGHSSGKLSSKSLLTSDDYELGAGIRKRHKGSEEEHDALIGMGKARGRNQTWDEHEASSDFISQLKIKKKKMASDQEQLASKLDKALSLTKQDKLKSPFKFSDSAGGKSKTSGGCGRYLTPYDSLLGKNRKALAKGLGLSLKSSREGKHKRAAKTRKMEVGFKARGQPKSAHSPFASEVSSYSYNTDSEEDEEFLKDEWPAQGPSSSKLTPSLLCSMVAKNSKAAGGPKLTKRGLAAPRTLKPKPATSRKQPFCLLLREAEARSSFSDSSEESFDQDESSEEEDEEEELEEEDEASGGGYRLGARERALSPGLEESGLGLLARFAASALPSPTVGPSLSVVQLEAKQKARKKEERQSLLGTEFEYTDSESEVKVRKRSPAGLLRPKKGLGEPGPSLAAPTPGARGPDPSSPDKAKLAVEKGRKARKLRGPKEPGFEAGPEASDDDLWTRRRSERIFLHDASAAAPAPVSTAPATKTSRCAKGGPLSPRKDAGRAKDRKDPRKKKKGKEAGPGAGLPPPRAPALPSEARAPHASSLTAAKRSKAKAKGKEVKKENRGKGGAVSKLMESMAAEEDFEPNQDSSFSEDEHLPRGGAVERPLTPAPRSCIIDKDELKDGLRVLIPMDDKLLYAGHVQTVHSPDIYRVVVEGERGNRPHIYCLEQLLQEAIIDVRPASTRFLPQGTRIAAYWSQQYRCLYPGTVVRGLLDLEDDGDLITVEFDDGDTGRIPLSHIRLLPPDYKIQCAEPSPALLVPSAKRRSRKTSKDTGEGKDGGTAGSEEPGAKARGRGRKPSAKAKGDRAATLEEGNPTDEVPSTPLALEPSSTPGSKKSPPEPVDKRAKAPKARPAPPQPSPAPPAFTSCPAPEPFAELPAPATSLAPAPLITMPATRPKPKKARAAEESGAKGPRRPGEEAELLVKLDHEGVTSPKSKKAKEALLLREDPGAGGWQEPKSLLSLGSYPPAAGSSEPKAPWPKATDGDLAQEPGPGLTFEDSGNPKSPDKAQAEQDGAEESESSSSSSSGSSSSSSSSSSSGSETEGEEEGDKNGDGGCGTGGRNCSAASSRAASPASSSSSSSSSSSSSSSSSSSSSSSSSSSSSSSSSSSSSSSSSSSSSSSSSSSSSSSSSSTTDEDSSCSSDDEAAPAPTAGPSAQAALPTKATKQAGKARPSAHSPGKKTPAPQPQAPPPQPTQPLQPKAQAGAKSRPKKREGVHLPTTKELAKRQRLPSVENRPKIAAFLPARQLWKWFGKPTQRRGMKGKARKLFYKAIVRGKEMIRIGDCAVFLSAGRPNLPYIGRIQSMWESWGNNMVVRVKWFYHPEETSPGKQFHQGQHWDQKSSRSPTVPGTPACLARPAAQGFSAALPVRWTGRRAGPSRPVPIGTPSRAADPSQGEMSADAAAGAPLPRLCCLEKGPNGYGFHLHGEKGKLGQYIRLVEPGSPAEKAGLLAGDRLVEVNGENVEKETHQQVVSRIRAALNAVRLLVVDPETDEQLQKLGVQVREELLRAQEAPGQAEPPAAAEVQGAGNENEPREADKSHPEQRELRPRLCTMKKGPSGYGFNLHSDKSKPGQFIRSVDPDSPAEASGLRAQDRIVEVNGVCMEGKQHGDVVSAIRAGGDETKLLVVDRETDEFFKKCRVIPSQEHLNGPLPVPFTNGEIQKENSREALAEAALESPRPALVRSASSDTSEELNSQDSPPKQDSTAPSSTSSSDPILDFNISLAMAKERAHQKRSSKRAPQMDWSKKNELFSNL

SEQ ID NO: 1431 - protein, 644 aa, Homo sapiens [sequence omitted]

SEQ ID NO: 1432 - protein, 644 aa, Homo sapiens [sequence omitted]

SEQ ID NO: 1433 - protein, 644 aa, Homo sapiens [sequence omitted]

SEQ ID NO: 1434 - protein, 1764 aa, Homo sapiens
MAGPRPSPWARLLLAALISVSLSGTLANRCKKAPVKSCTECVRVDKDCAYCTDEMFRDRRCNTQAELLAAGCQRESIVVMESSFQITEETQIDTTLRRSQMSPQGLRVRLRPGEERHFELEVFEPLESPVDLYILMDFSNSMSDDLDNLKKMGQNLARVLSQLTSDYTIGFGKFVDKVSVPQTDMRPEKLKEPWPNSDPPFSFKNVISLTEDVDEFRNKLQGERISGNLDAPEGGFDAILQTAVCTRDIGWRPDSTHLLVFSTESAFHYEADGANVLAGIMSRNDERCHLDTTGTYTQYRTQDYPSVPTLVRLLAKHNIIPIFAVTNYSYSYYEKLHTYFPVSSLGVLQEDSSNIVELLEEAFNRIRSNLDIRALDSPRGLRTEVTSKMFQKTRTGSFHIRRGEVGIYQVQLRALEHVDGTHVCQLPEDQKGNIHLKPSFSDGLKMDAGIICDVCTCELQKEVRSARCSFNGDFVCGQCVCSEGWSGQTCNCSTGSLSDIQPCLREGEDKPCSGRGECQCGHCVCYGEGRYEGQFCEYDNFQCPRTSGFLCNDRGRCSMGQCVCEPGWTGPSCDCPLSNATCIDSNGGICNGRGHCECGRCHCHQQSLYTDTICEINYSAIHPGLCEDLRSCVQCQAWGTGEKKGRTCEECNFKVKMVDELKRAEEVVVRCSFRDEDDDCTYSYTMEGDGAPGPNSTVLVHKKKDCPPGSFWWLIPLLLLLLPLLALLLLLCWKYCACCKACLALLPCCNRGHMVGFKEDHYMLRENLMASDHLDTPMLRSGNLKGRDVVRWKVTNNMQRPGFATHAASINPTELVPYGLSLRLARLCTENLLKPDTRECAQLRQEVEENLNEVYRQISGVHKLQQTKFRQQPNAGKKQDHTIVDTVLMAPRSAKPALLKLTEKQVEQRAFHDLKVAPGYYTLTADQDARGMVEFQEGVELVDVRVPLFIRPEDDDEKQLLVEAIDVPAGTATLGRRLVNITIIKEQARDVVSFEQPEFSVSRGDQVARIPVIRRVLDGGKSQVSYRTQDGTAQGNRDYIPVEGELLFQPGEAWKELQVKLLELQEVDSLLRGRQVRRFHVQLSNPKFGAHLGQPHSTTIIIRDPDELDRSFTSQMLSSQPPPHGDLGAPQNPNAKAAGSRKIHFNWLPPSGKPMGYRVKYWIQGDSESEAHLLDSKVPSVELTNLYPYCDYEMKVCAYGAQGEGPYSSLVSCRTHQEVPSEPGRLAFNVVSSTVTQLSWAEPAETNGEITAYEVCYGLVNDDNRPIGPMKKVLVDNPKNRMLLIENLRESQPYRYTVKARNGAGWGPEREAIINLATQPKRPMSIPIIPDIPIVDAQSGEDYDSFLMYSDDVLRSPSGSQRPSVSDDTGCGWKFEPLLGEELDLRRVTWRLPPELIPRLSASSGRSSDAEAPHGPPDDGGAGGKGGSLPRSATPGPPGEHLVNGRMDFAFPGSTNSLHRMTTTSAAAYGTHLSPHVPHRVLSTSSTLTRDYNSLTRSEHSHSTTLPRDYSTLTSVSSHDSRLTAGVPDTPTRLVFSALGPTSLRVSWQEPRCERPLQGYSVEYQLLNGGELHRLNIPNPAQTSVVVEDLLPNHSYVFRVRAQSQEGWGREREGVITIESQVHPQSPLCPLPGSAFTLSTPSAPGPLVFTALSPDSLQLSWERPRRPNGDIVGYLVTCEMAQGGGPATAFRVDGDSPESRLTVPGLSENVPYKFKVQARTTEGFGPEREGIITIESQDGGPFPQLGSRAGLFQHPLQSEYSSWW

SEQ ID NO: 1435 - protein, 1747 aa, Homo sapiens
MAGPRPSPWARLLLAALISVSLSGTLANRCKKAPVKSCTECVRVDKDCAYCTDEMFRDRRCNTQAELLAAGCQRESIVVMESSFQITEETQIDTTLRRSQMSPQGLRVRLRPGEERHFELEVFEPLESPVDLYILMDFSNSMSDDLDNLKKMGQNLARVLSQLTSDYTIGFGKFVDKVSVPQTDMRPEKLKEPWPNSDPPFSFKNVISLTEDVDEFRNKLQGERISGNLDAPEGGFDAILQTAVCTRDIGWRPDSTHLLVFSTESAFHYEADGANVLAGIMSRNDERCHLDTTGTYTQYRTQDYPSVPTLVRLLAKHNIIPIFAVTNYSYSYYEKLHTYFPVSSLGVLQEDSSNIVELLEEAFNRIRSNLDIRALDSPRGLRTEVTSKMFQKTRTGSFHIRRGEVGIYQVQLRALEHVDGTHVCQLPEDQKGNIHLKPSFSDGLKMDAGIICDVCTCELQKEVRSARCSFNGDFVCGQCVCSEGWSGQTCNCSTGSLSDIQPCLREGEDKPCSGRGECQCGHCVCYGEGRYEGQFCEYDNFQCPRTSGFLCNDRGRCSMGQCVCEPGWTGPSCDCPLSNATCIDSNGGICNGRGHCECGRCHCHQQSLYTDTICEINYSAIHPGLCEDLRSCVQCQAWGTGEKKGRTCEECNFKVKMVDELKRAEEVVVRCSFRDEDDDCTYSYTMEGDGAPGPNSTVLVHKKKDCPPGSFWWLIPLLLLLLPLLALLLLLCWKYCACCKACLALLPCCNRGHMVGFKEDHYMLRENLMASDHLDTPMLRSGNLKGRDVVRWKVTNNMQRPGFATHAASINPTELVPYGLSLRLARLCTENLLKPDTRECAQLRQEVEENLNEVYRQISGVHKLQQTKFRQQPNAGKKQDHTIVDTVLMAPRSAKPALLKLTEKQVEQRAFHDLKVAPGYYTLTADQDARGMVEFQEGVELVDVRVPLFIRPEDDDEKQLLVEAIDVPAGTATLGRRLVNITIIKEQARDVVSFEQPEFSVSRGDQVARIPVIRRVLDGGKSQVSYRTQDGTAQGNRDYIPVEGELLFQPGEAWKELQVKLLELQEVDSLLRGRQVRRFHVQLSNPKFGAHLGQPHSTTIIIRDPDELDRSFTSQMLSSQPPPHGDLGAPQNPNAKAAGSRKIHFNWLPPSGKPMGYRVKYWIQGDSESEAHLLDSKVPSVELTNLYPYCDYEMKVCAYGAQGEGPYSSLVSCRTHQEVPSEPGRLAFNVVSSTVTQLSWAEPAETNGEITAYEVCYGLVNDDNRPIGPMKKVLVDNPKNRMLLIENLRESQPYRYTVKARNGAGWGPEREAIINLATQPKRPMSIPIIPDIPIVDAQSGEDYDSFLMYSDDVLRSPSGSQRPSVSDDTEHLVNGRMDFAFPGSTNSLHRMTTTSAAAYGTHLSPHVPHRVLSTSSTLTRDYNSLTRSEHSHSTTLPRDYSTLTSVSSHGLPPIWEHGRSRLPLSWALGSRSRAQMKGFPPSRGPRDSIILAGRPAAPSWGPDSRLTAGVPDTPTRLVFSALGPTSLRVSWQEPRCERPLQGYSVEYQLLNGGELHRLNIPNPAQTSVVVEDLLPNHSYVFRVRAQSQEGWGREREGVITIESQVHPQSPLCPLPGSAFTLSTPSAPGPLVFTALSPDSLQLSWERPRRPNGDIVGYLVTCEMAQGGGPATAFRVDGDSPESRLTVPGLSENVPYKFKVQARTTEGFGPEREGIITIESQDGGPFPQLGSRAGLFQHPLQSEYSSWW

SEQ ID NO: 1436 - protein, 1694 aa, Homo sapiens
MAGPRPSPWARLLLAALISVSLSGTLANRCKKAPVKSCTECVRVDKDCAYCTDEMFRDRRCNTQAELLAAGCQRESIVVMESSFQITEETQIDTTLRRSQMSPQGLRVRLRPGEERHFELEVFEPLESPVDLYILMDFSNSMSDDLDNLKKMGQNLARVLSQLTSDYTIGFGKFVDKVSVPQTDMRPEKLKEPWPNSDPPFSFKNVISLTEDVDEFRNKLQGERISGNLDAPEGGFDAILQTAVCTRDIGWRPDSTHLLVFSTESAFHYEADGANVLAGIMSRNDERCHLDTTGTYTQYRTQDYPSVPTLVRLLAKHNIIPIFAVTNYSYSYYEKLHTYFPVSSLGVLQEDSSNIVELLEEAFNRIRSNLDIRALDSPRGLRTEVTSKMFQKTRTGSFHIRRGEVGIYQVQLRALEHVDGTHVCQLPEDQKGNIHLKPSFSDGLKMDAGIICDVCTCELQKEVRSARCSFNGDFVCGQCVCSEGWSGQTCNCSTGSLSDIQPCLREGEDKPCSGRGECQCGHCVCYGEGRYEGQFCEYDNFQCPRTSGFLCNDRGRCSMGQCVCEPGWTGPSCDCPLSNATCIDSNGGICNGRGHCECGRCHCHQQSLYTDTICEINYSAIHPGLCEDLRSCVQCQAWGTGEKKGRTCEECNFKVKMVDELKRAEEVVVRCSFRDEDDDCTYSYTMEGDGAPGPNSTVLVHKKKDCPPGSFWWLIPLLLLLLPLLALLLLLCWKYCACCKACLALLPCCNRGHMVGFKEDHYMLRENLMASDHLDTPMLRSGNLKGRDVVRWKVTNNMQRPGFATHAASINPTELVPYGLSLRLARLCTENLLKPDTRECAQLRQEVEENLNEVYRQISGVHKLQQTKFRQQPNAGKKQDHTIVDTVLMAPRSAKPALLKLTEKQVEQRAFHDLKVAPGYYTLTADQDARGMVEFQEGVELVDVRVPLFIRPEDDDEKQLLVEAIDVPAGTATLGRRLVNITIIKEQARDVVSFEQPEFSVSRGDQVARIPVIRRVLDGGKSQVSYRTQDGTAQGNRDYIPVEGELLFQPGEAWKELQVKLLELQEVDSLLRGRQVRRFHVQLSNPKFGAHLGQPHSTTIIIRDPDELDRSFTSQMLSSQPPPHGDLGAPQNPNAKAAGSRKIHFNWLPPSGKPMGYRVKYWIQGDSESEAHLLDSKVPSVELTNLYPYCDYEMKVCAYGAQGEGPYSSLVSCRTHQEVPSEPGRLAFNVVSSTVTQLSWAEPAETNGEITAYEVCYGLVNDDNRPIGPMKKVLVDNPKNRMLLIENLRESQPYRYTVKARNGAGWGPEREAIINLATQPKRPMSIPIIPDIPIVDAQSGEDYDSFLMYSDDVLRSPSGSQRPSVSDDTEHLVNGRMDFAFPGSTNSLHRMTTTSAAAYGTHLSPHVPHRVLSTSSTLTRDYNSLTRSEHSHSTTLPRDYSTLTSVSSHDSRLTAGVPDTPTRLVFSALGPTSLRVSWQEPRCERPLQGYSVEYQLLNGGELHRLNIPNPAQTSVVVEDLLPNHSYVFRVRAQSQEGWGREREGVITIESQVHPQSPLCPLPGSAFTLSTPSAPGPLVFTALSPDSLQLSWERPRRPNGDIVGYLVTCEMAQGGGPATAFRVDGDSPESRLTVPGLSENVPYKFKVQARTTEGFGPEREGIITIESQDGGPFPQLGSRAGLFQHPLQSEYSSWW

SEQ ID NO: 1437 - protein, 158 aa, Homo sapiens
MTEWETAAPAVAETPDIKLFGKWSTDDVQINDISLQDYIAVKEKYAKYLPHSAGRYAAKRFRKAQCPIVERLTNSMMMHGRNNGKKLMTVRIVKHAFEIIHLLTGENPLQVLVNAIINSGPREDSTRIGRAGTVRRQAVDVSPLRRVNQAIWLLCTGA

SEQ ID NO: 1438 - protein, 3085 aa, Homo sapiens
MKIVPDERDRVQKKTFTKWVNKHLIKAQRHISDLYEDLRDGHNLISLLEVLSGDSLPREKGRMRFHKLQNVQIALDYLRHRQVKLVNIRNDDIADGNPKLTLGLIWTIILHFQISDIQVSGQSEDMTAKEKLLLWSQRMVEGYQGLRCDNFTSSWRDGRLFNAIIHRHKPLLIDMNKVYRQTNLENLDQAFSVAERDLGVTRLLDPEDVDVPQPDEKSIITYVSSLYDAMPRVPDVQDGVRANELQLRWQEYRELVLLLLQWMRHHTAAFEERRFPSSFEEIEILWSQFLKFKEMELPAKEADKNRSKGIYQSLEGAVQAGQLKVPPGYHPLDVEKEWGKLHVAILEREKQLRSEFERLECLQRIVTKLQMEAGLCEEQLNQADALLQSDVRLLAAGKVPQRAGEVERDLDKADSMIRLLFNDVQTLKDGRHPQGEQMYRRVYRLHERLVAIRTEYNLRLKAGVAAPATQVAQVTLQSVQRRPELEDSTLRYLQDLLAWVEENQHRVDGAEWGVDLPSVEAQLGSHRGLHQSIEEFRAKIERARSDEGQLSPATRGAYRDCLGRLDLQYAKLLNSSKARLRSLESLHSFVAAATKELMWLNEKEEEEVGFDWSDRNTNMTAKKESYSALMRELELKEKKIKELQNAGDRLLREDHPARPTVESFQAALQTQWSWMLQLCCCIEAHLKENAAYFQFFSDVREAEGQLQKLQEALRRKYSCDRSATVTRLEDLLQDAQDEKEQLNEYKGHLSGLAKRAKAVVQLKPRHPAHPMRGRLPLLAVCDYKQVEVTVHKGDECQLVGPAQPSHWKVLSSSGSEAAVPSVCFLVPPPNQEAQEAVTRLEAQHQALVTLWHQLHVDMKSLLAWQSLRRDVQLIRSWSLATFRTLKPEEQRQALHSLELHYQAFLRDSQDAGGFGPEDRLMAEREYGSCSHHYQQLLQSLEQGAQEESRCQRCISELKDIRLQLEACETRTVHRLRLPLDKEPARECAQRIAEQQKAQAEVEGLGKGVARLSAEAEKVLALPEPSPAAPTLRSELELTLGKLEQVRSLSAIYLEKLKTISLVIRGTQGAEEVLRAHEEQLKEAQAVPATLPELEATKASLKKLRAQAEAQQPTFDALRDELRGAQEVGERLQQRHGERDVEVERWRERVAQLLERWQAVLAQTDVRQRELEQLGRQLRYYRESADPLGAWLQDARRRQEQIQAMPLADSQAVREQLRQEQALLEEIERHGEKVEECQRFAKQYINAIKDYELQLVTYKAQLEPVASPAKKPKVQSGSESVIQEYVDLRTHYSELTTLTSQYIKFISETLRRMEEEERLAEQQRAEERERLAEVEAALEKQRQLAEAHAQAKAQAEREAKELQQRMQEEVVRREEAAVDAQQQKRSIQEELQQLRQSSEAEIQAKARQAEAAERSRLRIEEEIRVVRLQLEATERQRGGAEGELQALRARAEEAEAQKRQAQEEAERLRRQVQDESQRKRQAEVELASRVKAEAEAAREKQRALQALEELRLQAEEAERRLRQAEVERARQVQVALETAQRSAEAELQSKRASFAEKTAQLERSLQEEHVAVAQLREEAERRAQQQAEAERAREEAERELERWQLKANEALRLRLQAEEVAQQKSLAQAEAEKQKEEAEREARRRGKAEEQAVRQRELAEQELEKQRQLAEGTAQQRLAAEQELIRLRAETEQGEQQRQLLEEELARLQREAAAATQKRQELEAELAKVRAEMEVLLASKARAEEESRSTSEKSKQRLEAEAGRFRELAEEAARLRALAEEAKRQRQLAEEDAARQRAEAERVLAEKLAAIGEATRLKTEAEIALKEKEAENERLRRLAEDEAFQRRRLEEQAAQHKADIEERLAQLRKASDSELERQKGLVEDTLRQRRQVEEEILALKASFEKAAAGKAELELELGRIRSNAEDTLRSKEQAELEAARQRQLAAEEERRRREAEERVQKSLAAEEEAARQRKAALEEVERLKAKVEEARRLRERAEQESARQLQLAQEAAQKRLQAEEKAHAFAVQQKEQELQQTLQQEQSVLDQLRGEGGGGGGGGGGGDGGSAMEPGEVKDRILENISLSVKKLQSYFAACEDEIPAIRNHDKVLQRLCEHLDHALLYGLQDLSSGYWVLVVHFTRREAIKQIEVLQHVATNLGRSRAWLYLALNENSLESYLRLFQENLGLLHKYYVKNALVCSHDHLTLFLTLVSGLEFIRFELDLDAPYLDLAPYMPDYYKPQYLLDFEDRLPSSVHGSDSLSLNSFNSVTSTNLEWDDSAIAPSSEDYDFGDVFPAVPSVPSTDWEDGDLTDTVSGPRSTASDLTSSKASTRSPTQRQNPFNEEPAETVSSSDTTPVHTTSQEKEEAQALDPPDACTELEVIRVTKKKKIGKKKKSRSDEEASPLHPACSQKKCAKQGDGDSRNGSPSLGRDSPDTMLASPQEEGEGPSSTTESSERSEPGLLIPEMKDTSMERLGQPLSKVIDQLNGQLDPSTWCSRAEPPDQSFRTGSPGDAPERPPLCDFSEGLSAPMDFYRFTVESPSTVTSGGGHHDPAGLGQPLHVPSSPEAAGQEEEGGGGEGQTPRPLEDTTREAQELEAQLSLVREGPVSEPEPGTQEVLCQLKRDQPSPCLSSAEDSGVDEGQGSPSEMVHSSEFRVDNNHLLLLMIHVFRENEEQLFKMIRMSTGHMEGNLQLLYVLLTDCYVYLLRKGATEKPYLVEEAVSYNELDYVSVGLDQQTVKLVCTNRRKQFLLDTADVALAEFFLASLKSAMIKGCREPPYPSILTDATMEKLALAKFVAQESKCEASAVTVRFYGLVHWEDPTDESLGPTPCHCSPPEGTITKEGMLHYKAGTSYLGKEHWKTCFVVLSNGILYQYPDRTDVIPLLSVNMGGEQCGGCRRANTTDRPHAFQVILSDRPCLELSAESEAEMAEWMQHLCQAVSKGVIPQGVAPSPCIPCCLVLTDDRLFTCHEDCQTSFFRSLGTAKLGDISAVSTEPGKEYCVLEFSQDSQQLLPPWVIYLSCTSELDRLLSALNSGWKTIYQVDLPHTAIQEASNKKKFEDALSLIHSAWQRSDSLCRGRASRDPWC

SEQ ID NO: 1439 - protein, 3117 aa, Homo sapiens
MEPSGSLFPSLVVVGHVVTLAAVWHWRRGRRWAQDEQDERDRVQKKTFTKWVNKHLIKAQRHISDLYEDLRDGHNLISLLEVLSGDSLPREKGRMRFHKLQNVQIALDYLRHRQVKLVNIRNDDIADGNPKLTLGLIWTIILHFQISDIQVSGQSEDMTAKEKLLLWSQRMVEGYQGLRCDNFTSSWRDGRLFNAIIHRHKPLLIDMNKVYRQTNLENLDQAFSVAERDLGVTRLLDPEDVDVPQPDEKSIITYVSSLYDAMPRVPDVQDGVRANELQLRWQEYRELVLLLLQWMRHHTAAFEERRFPSSFEEIEILWSQFLKFKEMELPAKEADKNRSKGIYQSLEGAVQAGQLKVPPGYHPLDVEKEWGKLHVAILEREKQLRSEFERLECLQRIVTKLQMEAGLCEEQLNQADALLQSDVRLLAAGKVPQRAGEVERDLDKADSMIRLLFNDVQTLKDGRHPQGEQMYRRVYRLHERLVAIRTEYNLRLKAGVAAPATQVAQVTLQSVQRRPELEDSTLRYLQDLLAWVEENQHRVDGAEWGVDLPSVEAQLGSHRGLHQSIEEFRAKIERARSDEGQLSPATRGAYRDCLGRLDLQYAKLLNSSKARLRSLESLHSFVAAATKELMWLNEKEEEEVGFDWSDRNTNMTAKKESYSALMRELELKEKKIKELQNAGDRLLREDHPARPTVESFQAALQTQWSWMLQLCCCIEAHLKENAAYFQFFSDVREAEGQLQKLQEALRRKYSCDRSATVTRLEDLLQDAQDEKEQLNEYKGHLSGLAKRAKAVVQLKPRHPAHPMRGRLPLLAVCDYKQVEVTVHKGDECQLVGPAQPSHWKVLSSSGSEAAVPSVCFLVPPPNQEAQEAVTRLEAQHQALVTLWHQLHVDMKSLLAWQSLRRDVQLIRSWSLATFRTLKPEEQRQALHSLELHYQAFLRDSQDAGGFGPEDRLMAEREYGSCSHHYQQLLQSLEQGAQEESRCQRCISELKDIRLQLEACETRTVHRLRLPLDKEPARECAQRIAEQQKAQAEVEGLGKGVARLSAEAEKVLALPEPSPAAPTLRSELELTLGKLEQVRSLSAIYLEKLKTISLVIRGTQGAEEVLRAHEEQLKEAQAVPATLPELEATKASLKKLRAQAEAQQPTFDALRDELRGAQEVGERLQQRHGERDVEVERWRERVAQLLERWQAVLAQTDVRQRELEQLGRQLRYYRESADPLGAWLQDARRRQEQIQAMPLADSQAVREQLRQEQALLEEIERHGEKVEECQRFAKQYINAIKDYELQLVTYKAQLEPVASPAKKPKVQSGSESVIQEYVDLRTHYSELTTLTSQYIKFISETLRRMEEEERLAEQQRAEERERLAEVEAALEKQRQLAEAHAQAKAQAEREAKELQQRMQEEVVRREEAAVDAQQQKRSIQEELQQLRQSSEAEIQAKARQAEAAERSRLRIEEEIRVVRLQLEATERQRGGAEGELQALRARAEEAEAQKRQAQEEAERLRRQVQDESQRKRQAEVELASRVKAEAEAAREKQRALQALEELRLQAEEAERRLRQAEVERARQVQVALETAQRSAEAELQSKRASFAEKTAQLERSLQEEHVAVAQLREEAERRAQQQAEAERAREEAERELERWQLKANEALRLRLQAEEVAQQKSLAQAEAEKQKEEAEREARRRGKAEEQAVRQRELAEQELEKQRQLAEGTAQQRLAAEQELIRLRAETEQGEQQRQLLEEELARLQREAAAATQKRQELEAELAKVRAEMEVLLASKARAEEESRSTSEKSKQRLEAEAGRFRELAEEAARLRALAEEAKRQRQLAEEDAARQRAEAERVLAEKLAAIGEATRLKTEAEIALKEKEAENERLRRLAEDEAFQRRRLEEQAAQHKADIEERLAQLRKASDSELERQKGLVEDTLRQRRQVEEEILALKASFEKAAAGKAELELELGRIRSNAEDTLRSKEQAELEAARQRQLAAEEERRRREAEERVQKSLAAEEEAARQRKAALEEVERLKAKVEEARRLRERAEQESARQLQLAQEAAQKRLQAEEKAHAFAVQQKEQELQQTLQQEQSVLDQLRGEGGGGGGGGGGGDGGSAMEPGEVKDRILENISLSVKKLQSYFAACEDEIPAIRNHDKVLQRLCEHLDHALLYGLQDLSSGYWVLVVHFTRREAIKQIEVLQHVATNLGRSRAWLYLALNENSLESYLRLFQENLGLLHKYYVKNALVCSHDHLTLFLTLVSGLEFIRFELDLDAPYLDLAPYMPDYYKPQYLLDFEDRLPSSVHGSDSLSLNSFNSVTSTNLEWDDSAIAPSSEDYDFGDVFPAVPSVPSTDWEDGDLTDTVSGPRSTASDLTSSKASTRSPTQRQNPFNEEPAETVSSSDTTPVHTTSQEKEEAQALDPPDACTELEVIRVTKKKKIGKKKKSRSDEEASPLHPACSQKKCAKQGDGDSRNGSPSLGRDSPDTMLASPQEEGEGPSSTTESSERSEPGLLIPEMKDTSMERLGQPLSKVIDQLNGQLDPSTWCSRAEPPDQSFRTGSPGDAPERPPLCDFSEGLSAPMDFYRFTVESPSTVTSGGGHHDPAGLGQPLHVPSSPEAAGQEEEGGGGEGQTPRPLEDTTREAQELEAQLSLVREGPVSEPEPGTQEVLCQLKRDQPSPCLSSAEDSGVDEGQGSPSEMVHSSEFRVDNNHLLLLMIHVFRENEEQLFKMIRMSTGHMEGNLQLLYVLLTDCYVYLLRKGATEKPYLVEEAVSYNELDYVSVGLDQQTVKLVCTNRRKQFLLDTADVALAEFFLASLKSAMIKGCREPPYPSILTDATMEKLALAKFVAQESKCEASAVTVRFYGLVHWEDPTDESLGPTPCHCSPPEGTITKEGMLHYKAGTSYLGKEHWKTCFVVLSNGILYQYPDRTDVIPLLSVNMGGEQCGGCRRANTTDRPHAFQVILSDRPCLELSAESEAEMAEWMQHLCQAVSKGVIPQGVAPSPCIPCCLVLTDDRLFTCHEDCQTSFFRSLGTAKLGDISAVSTEPGKEYCVLEFSQDSQQLLPPWVIYLSCTSELDRLLSALNSGWKTIYQVDLPHTAIQEASNKKKFEDALSLIHSAWQRSDSLCRGRASRDPWC

SEQ ID NO: 1440 - protein, 3254 aa, Homo sapiens
MVAGMLMPRDQLRAIYEVLFREGVMVAKKDRRPRSLHPHVPGVTNLQVMRAMASLRARGLVRETFAWCHFYWYLTNEGIAHLRQYLHLPPEIVPASLQRVRRPVAMVMPARRTPHVQAVQGPLGSPPKRGPLPTEEQRVYRRKELEEVSPETPVVPATTQRTLARPGPEPAPATDERDRVQKKTFTKWVNKHLIKAQRHISDLYEDLRDGHNLISLLEVLSGDSLPREKGRMRFHKLQNVQIALDYLRHRQVKLVNIRNDDIADGNPKLTLGLIWTIILHFQISDIQVSGQSEDMTAKEKLLLWSQRMVEGYQGLRCDNFTSSWRDGRLFNAIIHRHKPLLIDMNKVYRQTNLENLDQAFSVAERDLGVTRLLDPEDVDVPQPDEKSIITYVSSLYDAMPRVPDVQDGVRANELQLRWQEYRELVLLLLQWMRHHTAAFEERRFPSSFEEIEILWSQFLKFKEMELPAKEADKNRSKGIYQSLEGAVQAGQLKVPPGYHPLDVEKEWGKLHVAILEREKQLRSEFERLECLQRIVTKLQMEAGLCEEQLNQADALLQSDVRLLAAGKVPQRAGEVERDLDKADSMIRLLFNDVQTLKDGRHPQGEQMYRRVYRLHERLVAIRTEYNLRLKAGVAAPATQVAQVTLQSVQRRPELEDSTLRYLQDLLAWVEENQHRVDGAEWGVDLPSVEAQLGSHRGLHQSIEEFRAKIERARSDEGQLSPATRGAYRDCLGRLDLQYAKLLNSSKARLRSLESLHSFVAAATKELMWLNEKEEEEVGFDWSDRNTNMTAKKESYSALMRELELKEKKIKELQNAGDRLLREDHPARPTVESFQAALQTQWSWMLQLCCCIEAHLKENAAYFQFFSDVREAEGQLQKLQEALRRKYSCDRSATVTRLEDLLQDAQDEKEQLNEYKGHLSGLAKRAKAVVQLKPRHPAHPMRGRLPLLAVCDYKQVEVTVHKGDECQLVGPAQPSHWKVLSSSGSEAAVPSVCFLVPPPNQEAQEAVTRLEAQHQALVTLWHQLHVDMKSLLAWQSLRRDVQLIRSWSLATFRTLKPEEQRQALHSLELHYQAFLRDSQDAGGFGPEDRLMAEREYGSCSHHYQQLLQSLEQGAQEESRCQRCISELKDIRLQLEACETRTVHRLRLPLDKEPARECAQRIAEQQKAQAEVEGLGKGVARLSAEAEKVLALPEPSPAAPTLRSELELTLGKLEQVRSLSAIYLEKLKTISLVIRGTQGAEEVLRAHEEQLKEAQAVPATLPELEATKASLKKLRAQAEAQQPTFDALRDELRGAQEVGERLQQRHGERDVEVERWRERVAQLLERWQAVLAQTDVRQRELEQLGRQLRYYRESADPLGAWLQDARRRQEQIQAMPLADSQAVREQLRQEQALLEEIERHGEKVEECQRFAKQYINAIKDYELQLVTYKAQLEPVASPAKKPKVQSGSESVIQEYVDLRTHYSELTTLTSQYIKFISETLRRMEEEERLAEQQRAEERERLAEVEAALEKQRQLAEAHAQAKAQAEREAKELQQRMQEEVVRREEAAVDAQQQKRSIQEELQQLRQSSEAEIQAKARQAEAAERSRLRIEEEIRVVRLQLEATERQRGGAEGELQALRARAEEAEAQKRQAQEEAERLRRQVQDESQRKRQAEVELASRVKAEAEAAREKQRALQALEELRLQAEEAERRLRQAEVERARQVQVALETAQRSAEAELQSKRASFAEKTAQLERSLQEEHVAVAQLREEAERRAQQQAEAERAREEAERELERWQLKANEALRLRLQAEEVAQQKSLAQAEAEKQKEEAEREARRRGKAEEQAVRQRELAEQELEKQRQLAEGTAQQRLAAEQELIRLRAETEQGEQQRQLLEEELARLQREAAAATQKRQELEAELAKVRAEMEVLLASKARAEEESRSTSEKSKQRLEAEAGRFRELAEEAARLRALAEEAKRQRQLAEEDAARQRAEAERVLAEKLAAIGEATRLKTEAEIALKEKEAENERLRRLAEDEAFQRRRLEEQAAQHKADIEERLAQLRKASDSELERQKGLVEDTLRQRRQVEEEILALKASFEKAAAGKAELELELGRIRSNAEDTLRSKEQAELEAARQRQLAAEEERRRREAEERVQKSLAAEEEAARQRKAALEEVERLKAKVEEARRLRERAEQESARQLQLAQEAAQKRLQAEEKAHAFAVQQKEQELQQTLQQEQSVLDQLRGEGGGGGGGGGGGDGGSAMEPGEVKDRILENISLSVKKLQSYFAACEDEIPAIRNHDKVLQRLCEHLDHALLYGLQDLSSGYWVLVVHFTRREAIKQIEVLQHVATNLGRSRAWLYLALNENSLESYLRLFQENLGLLHKYYVKNALVCSHDHLTLFLTLVSGLEFIRFELDLDAPYLDLAPYMPDYYKPQYLLDFEDRLPSSVHGSDSLSLNSFNSVTSTNLEWDDSAIAPSSEDYDFGDVFPAVPSVPSTDWEDGDLTDTVSGPRSTASDLTSSKASTRSPTQRQNPFNEEPAETVSSSDTTPVHTTSQEKEEAQALDPPDACTELEVIRVTKKKKIGKKKKSRSDEEASPLHPACSQKKCAKQGDGDSRNGSPSLGRDSPDTMLASPQEEGEGPSSTTESSERSEPGLLIPEMKDTSMERLGQPLSKVIDQLNGQLDPSTWCSRAEPPDQSFRTGSPGDAPERPPLCDFSEGLSAPMDFYRFTVESPSTVTSGGGHHDPAGLGQPLHVPSSPEAAGQEEEGGGGEGQTPRPLEDTTREAQELEAQLSLVREGPVSEPEPGTQEVLCQLKRDQPSPCLSSAEDSGVDEGQGSPSEMVHSSEFRVDNNHLLLLMIHVFRENEEQLFKMIRMSTGHMEGNLQLLYVLLTDCYVYLLRKGATEKPYLVEEAVSYNELDYVSVGLDQQTVKLVCTNRRKQFLLDTADVALAEFFLASLKSAMIKGCREPPYPSILTDATMEKLALAKFVAQESKCEASAVTVRFYGLVHWEDPTDESLGPTPCHCSPPEGTITKEGMLHYKAGTSYLGKEHWKTCFVVLSNGILYQYPDRTDVIPLLSVNMGGEQCGGCRRANTTDRPHAFQVILSDRPCLELSAESEAEMAEWMQHLCQAVSKGVIPQGVAPSPCIPCCLVLTDDRLFTCHEDCQTSFFRSLGTAKLGDISAVSTEPGKEYCVLEFSQDSQQLLPPWVIYLSCTSELDRLLSALNSGWKTIYQVDLPHTAIQEASNKKKFEDALSLIHSAWQRSDSLCRGRASRDPWC

SEQ ID NO: 1441 - protein, 3103 aa, Homo sapiens
MAGPLPDEQDFIQAYEEVREKYKDERDRVQKKTFTKWVNKHLIKAQRHISDLYEDLRDGHNLISLLEVLSGDSLPREKGRMRFHKLQNVQIALDYLRHRQVKLVNIRNDDIADGNPKLTLGLIWTIILHFQISDIQVSGQSEDMTAKEKLLLWSQRMVEGYQGLRCDNFTSSWRDGRLFNAIIHRHKPLLIDMNKVYRQTNLENLDQAFSVAERDLGVTRLLDPEDVDVPQPDEKSIITYVSSLYDAMPRVPDVQDGVRANELQLRWQEYRELVLLLLQWMRHHTAAFEERRFPSSFEEIEILWSQFLKFKEMELPAKEADKNRSKGIYQSLEGAVQAGQLKVPPGYHPLDVEKEWGKLHVAILEREKQLRSEFERLECLQRIVTKLQMEAGLCEEQLNQADALLQSDVRLLAAGKVPQRAGEVERDLDKADSMIRLLFNDVQTLKDGRHPQGEQMYRRVYRLHERLVAIRTEYNLRLKAGVAAPATQVAQVTLQSVQRRPELEDSTLRYLQDLLAWVEENQHRVDGAEWGVDLPSVEAQLGSHRGLHQSIEEFRAKIERARSDEGQLSPATRGAYRDCLGRLDLQYAKLLNSSKARLRSLESLHSFVAAATKELMWLNEKEEEEVGFDWSDRNTNMTAKKESYSALMRELELKEKKIKELQNAGDRLLREDHPARPTVESFQAALQTQWSWMLQLCCCIEAHLKENAAYFQFFSDVREAEGQLQKLQEALRRKYSCDRSATVTRLEDLLQDAQDEKEQLNEYKGHLSGLAKRAKAVVQLKPRHPAHPMRGRLPLLAVCDYKQVEVTVHKGDECQLVGPAQPSHWKVLSSSGSEAAVPSVCFLVPPPNQEAQEAVTRLEAQHQALVTLWHQLHVDMKSLLAWQSLRRDVQLIRSWSLATFRTLKPEEQRQALHSLELHYQAFLRDSQDAGGFGPEDRLMAEREYGSCSHHYQQLLQSLEQGAQEESRCQRCISELKDIRLQLEACETRTVHRLRLPLDKEPARECAQRIAEQQKAQAEVEGLGKGVARLSAEAEKVLALPEPSPAAPTLRSELELTLGKLEQVRSLSAIYLEKLKTISLVIRGTQGAEEVLRAHEEQLKEAQAVPATLPELEATKASLKKLRAQAEAQQPTFDALRDELRGAQEVGERLQQRHGERDVEVERWRERVAQLLERWQAVLAQTDVRQRELEQLGRQLRYYRESADPLGAWLQDARRRQEQIQAMPLADSQAVREQLRQEQALLEEIERHGEKVEECQRFAKQYINAIKDYELQLVTYKAQLEPVASPAKKPKVQSGSESVIQEYVDLRTHYSELTTLTSQYIKFISETLRRMEEEERLAEQQRAEERERLAEVEAALEKQRQLAEAHAQAKAQAEREAKELQQRMQEEVVRREEAAVDAQQQKRSIQEELQQLRQSSEAEIQAKARQAEAAERSRLRIEEEIRVVRLQLEATERQRGGAEGELQALRARAEEAEAQKRQAQEEAERLRRQVQDESQRKRQAEVELASRVKAEAEAAREKQRALQALEELRLQAEEAERRLRQAEVERARQVQVALETAQRSAEAELQSKRASFAEKTAQLERSLQEEHVAVAQLREEAERRAQQQAEAERAREEAERELERWQLKANEALRLRLQAEEVAQQKSLAQAEAEKQKEEAEREARRRGKAEEQAVRQRELAEQELEKQRQLAEGTAQQRLAAEQELIRLRAETEQGEQQRQLLEEELARLQREAAAATQKRQELEAELAKVRAEMEVLLASKARAEEESRSTSEKSKQRLEAEAGRFRELAEEAARLRALAEEAKRQRQLAEEDAARQRAEAERVLAEKLAAIGEATRLKTEAEIALKEKEAENERLRRLAEDEAFQRRRLEEQAAQHKADIEERLAQLRKASDSELERQKGLVEDTLRQRRQVEEEILALKASFEKAAAGKAELELELGRIRSNAEDTLRSKEQAELEAARQRQLAAEEERRRREAEERVQKSLAAEEEAARQRKAALEEVERLKAKVEEARRLRERAEQESARQLQLAQEAAQKRLQAEEKAHAFAVQQKEQELQQTLQQEQSVLDQLRGEGGGGGGGGGGGDGGSAMEPGEVKDRILENISLSVKKLQSYFAACEDEIPAIRNHDKVLQRLCEHLDHALLYGLQDLSSGYWVLVVHFTRREAIKQIEVLQHVATNLGRSRAWLYLALNENSLESYLRLFQENLGLLHKYYVKNALVCSHDHLTLFLTLVSGLEFIRFELDLDAPYLDLAPYMPDYYKPQYLLDFEDRLPSSVHGSDSLSLNSFNSVTSTNLEWDDSAIAPSSEDYDFGDVFPAVPSVPSTDWEDGDLTDTVSGPRSTASDLTSSKASTRSPTQRQNPFNEEPAETVSSSDTTPVHTTSQEKEEAQALDPPDACTELEVIRVTKKKKIGKKKKSRSDEEASPLHPACSQKKCAKQGDGDSRNGSPSLGRDSPDTMLASPQEEGEGPSSTTESSERSEPGLLIPEMKDTSMERLGQPLSKVIDQLNGQLDPSTWCSRAEPPDQSFRTGSPGDAPERPPLCDFSEGLSAPMDFYRFTVESPSTVTSGGGHHDPAGLGQPLHVPSSPEAAGQEEEGGGGEGQTPRPLEDTTREAQELEAQLSLVREGPVSEPEPGTQEVLCQLKRDQPSPCLSSAEDSGVDEGQGSPSEMVHSSEFRVDNNHLLLLMIHVFRENEEQLFKMIRMSTGHMEGNLQLLYVLLTDCYVYLLRKGATEKPYLVEEAVSYNELDYVSVGLDQQTVKLVCTNRRKQFLLDTADVALAEFFLASLKSAMIKGCREPPYPSILTDATMEKLALAKFVAQESKCEASAVTVRFYGLVHWEDPTDESLGPTPCHCSPPEGTITKEGMLHYKAGTSYLGKEHWKTCFVVLSNGILYQYPDRTDVIPLLSVNMGGEQCGGCRRANTTDRPHAFQVILSDRPCLELSAESEAEMAEWMQHLCQAVSKGVIPQGVAPSPCIPCCLVLTDDRLFTCHEDCQTSFFRSLGTAKLGDISAVSTEPGKEYCVLEFSQDSQQLLPPWVIYLSCTSELDRLLSALNSGWKTIYQVDLPHTAIQEASNKKKFEDALSLIHSAWQRSDSLCRGRASRDPWC

SEQ ID NO: 1442 - protein, 3095 aa, Homo sapiens
MDPSRAIQNEISSLKDERDRVQKKTFTKWVNKHLIKAQRHISDLYEDLRDGHNLISLLEVLSGDSLPREKGRMRFHKLQNVQIALDYLRHRQVKLVNIRNDDIADGNPKLTLGLIWTIILHFQISDIQVSGQSEDMTAKEKLLLWSQRMVEGYQGLRCDNFTSSWRDGRLFNAIIHRHKPLLIDMNKVYRQTNLENLDQAFSVAERDLGVTRLLDPEDVDVPQPDEKSIITYVSSLYDAMPRVPDVQDGVRANELQLRWQEYRELVLLLLQWMRHHTAAFEERRFPSSFEEIEILWSQFLKFKEMELPAKEADKNRSKGIYQSLEGAVQAGQLKVPPGYHPLDVEKEWGKLHVAILEREKQLRSEFERLECLQRIVTKLQMEAGLCEEQLNQADALLQSDVRLLAAGKVPQRAGEVERDLDKADSMIRLLFNDVQTLKDGRHPQGEQMYRRVYRLHERLVAIRTEYNLRLKAGVAAPATQVAQVTLQSVQRRPELEDSTLRYLQDLLAWVEENQHRVDGAEWGVDLPSVEAQLGSHRGLHQSIEEFRAKIERARSDEGQLSPATRGAYRDCLGRLDLQYAKLLNSSKARLRSLESLHSFVAAATKELMWLNEKEEEEVGFDWSDRNTNMTAKKESYSALMRELELKEKKIKELQNAGDRLLREDHPARPTVESFQAALQTQWSWMLQLCCCIEAHLKENAAYFQFFSDVREAEGQLQKLQEALRRKYSCDRSATVTRLEDLLQDAQDEKEQLNEYKGHLSGLAKRAKAVVQLKPRHPAHPMRGRLPLLAVCDYKQVEVTVHKGDECQLVGPAQPSHWKVLSSSGSEAAVPSVCFLVPPPNQEAQEAVTRLEAQHQALVTLWHQLHVDMKSLLAWQSLRRDVQLIRSWSLATFRTLKPEEQRQALHSLELHYQAFLRDSQDAGGFGPEDRLMAEREYGSCSHHYQQLLQSLEQGAQEESRCQRCISELKDIRLQLEACETRTVHRLRLPLDKEPARECAQRIAEQQKAQAEVEGLGKGVARLSAEAEKVLALPEPSPAAPTLRSELELTLGKLEQVRSLSAIYLEKLKTISLVIRGTQGAEEVLRAHEEQLKEAQAVPATLPELEATKASLKKLRAQAEAQQPTFDALRDELRGAQEVGERLQQRHGERDVEVERWRERVAQLLERWQAVLAQTDVRQRELEQLGRQLRYYRESADPLGAWLQDARRRQEQIQAMPLADSQAVREQLRQEQALLEEIERHGEKVEECQRFAKQYINAIKDYELQLVTYKAQLEPVASPAKKPKVQSGSESVIQEYVDLRTHYSELTTLTSQYIKFISETLRRMEEEERLAEQQRAEERERLAEVEAALEKQRQLAEAHAQAKAQAEREAKELQQRMQEEVVRREEAAVDAQQQKRSIQEELQQLRQSSEAEIQAKARQAEAAERSRLRIEEEIRVVRLQLEATERQRGGAEGELQALRARAEEAEAQKRQAQEEAERLRRQVQDESQRKRQAEVELASRVKAEAEAAREKQRALQALEELRLQAEEAERRLRQAEVERARQVQVALETAQRSAEAELQSKRASFAEKTAQLERSLQEEHVAVAQLREEAERRAQQQAEAERAREEAERELERWQLKANEALRLRLQAEEVAQQKSLAQAEAEKQKEEAEREARRRGKAEEQAVRQRELAEQELEKQRQLAEGTAQQRLAAEQELIRLRAETEQGEQQRQLLEEELARLQREAAAATQKRQELEAELAKVRAEMEVLLASKARAEEESRSTSEKSKQRLEAEAGRFRELAEEAARLRALAEEAKRQRQLAEEDAARQRAEAERVLAEKLAAIGEATRLKTEAEIALKEKEAENERLRRLAEDEAFQRRRLEEQAAQHKADIEERLAQLRKASDSELERQKGLVEDTLRQRRQVEEEILALKASFEKAAAGKAELELELGRIRSNAEDTLRSKEQAELEAARQRQLAAEEERRRREAEERVQKSLAAEEEAARQRKAALEEVERLKAKVEEARRLRERAEQESARQLQLAQEAAQKRLQAEEKAHAFAVQQKEQELQQTLQQEQSVLDQLRGEGGGGGGGGGGGDGGSAMEPGEVKDRILENISLSVKKLQSYFAACEDEIPAIRNHDKVLQRLCEHLDHALLYGLQDLSSGYWVLVVHFTRREAIKQIEVLQHVATNLGRSRAWLYLALNENSLESYLRLFQENLGLLHKYYVKNALVCSHDHLTLFLTLVSGLEFIRFELDLDAPYLDLAPYMPDYYKPQYLLDFEDRLPSSVHGSDSLSLNSFNSVTSTNLEWDDSAIAPSSEDYDFGDVFPAVPSVPSTDWEDGDLTDTVSGPRSTASDLTSSKASTRSPTQRQNPFNEEPAETVSSSDTTPVHTTSQEKEEAQALDPPDACTELEVIRVTKKKKIGKKKKSRSDEEASPLHPACSQKKCAKQGDGDSRNGSPSLGRDSPDTMLASPQEEGEGPSSTTESSERSEPGLLIPEMKDTSMERLGQPLSKVIDQLNGQLDPSTWCSRAEPPDQSFRTGSPGDAPERPPLCDFSEGLSAPMDFYRFTVESPSTVTSGGGHHDPAGLGQPLHVPSSPEAAGQEEEGGGGEGQTPRPLEDTTREAQELEAQLSLVREGPVSEPEPGTQEVLCQLKRDQPSPCLSSAEDSGVDEGQGSPSEMVHSSEFRVDNNHLLLLMIHVFRENEEQLFKMIRMSTGHMEGNLQLLYVLLTDCYVYLLRKGATEKPYLVEEAVSYNELDYVSVGLDQQTVKLVCTNRRKQFLLDTADVALAEFFLASLKSAMIKGCREPPYPSILTDATMEKLALAKFVAQESKCEASAVTVRFYGLVHWEDPTDESLGPTPCHCSPPEGTITKEGMLHYKAGTSYLGKEHWKTCFVVLSNGILYQYPDRTDVIPLLSVNMGGEQCGGCRRANTTDRPHAFQVILSDRPCLELSAESEAEMAEWMQHLCQAVSKGVIPQGVAPSPCIPCCLVLTDDRLFTCHEDCQTSFFRSLGTAKLGDISAVSTEPGKEYCVLEFSQDSQQLLPPWVIYLSCTSELDRLLSALNSGWKTIYQVDLPHTAIQEASNKKKFEDALSLIHSAWQRSDSLCRGRASRDPWC

SEQ ID NO: 1443 - protein, 3121 aa, Homo sapiens
MSGAGGAFASPREVLLERPCWLDGGCEPARRGYLYQQLCCVDERDRVQKKTFTKWVNKHLIKAQRHISDLYEDLRDGHNLISLLEVLSGDSLPREKGRMRFHKLQNVQIALDYLRHRQVKLVNIRNDDIADGNPKLTLGLIWTIILHFQISDIQVSGQSEDMTAKEKLLLWSQRMVEGYQGLRCDNFTSSWRDGRLFNAIIHRHKPLLIDMNKVYRQTNLENLDQAFSVAERDLGVTRLLDPEDVDVPQPDEKSIITYVSSLYDAMPRVPDVQDGVRANELQLRWQEYRELVLLLLQWMRHHTAAFEERRFPSSFEEIEILWSQFLKFKEMELPAKEADKNRSKGIYQSLEGAVQAGQLKVPPGYHPLDVEKEWGKLHVAILEREKQLRSEFERLECLQRIVTKLQMEAGLCEEQLNQADALLQSDVRLLAAGKVPQRAGEVERDLDKADSMIRLLFNDVQTLKDGRHPQGEQMYRRVYRLHERLVAIRTEYNLRLKAGVAAPATQVAQVTLQSVQRRPELEDSTLRYLQDLLAWVEENQHRVDGAEWGVDLPSVEAQLGSHRGLHQSIEEFRAKIERARSDEGQLSPATRGAYRDCLGRLDLQYAKLLNSSKARLRSLESLHSFVAAATKELMWLNEKEEEEVGFDWSDRNTNMTAKKESYSALMRELELKEKKIKELQNAGDRLLREDHPARPTVESFQAALQTQWSWMLQLCCCIEAHLKENAAYFQFFSDVREAEGQLQKLQEALRRKYSCDRSATVTRLEDLLQDAQDEKEQLNEYKGHLSGLAKRAKAVVQLKPRHPAHPMRGRLPLLAVCDYKQVEVTVHKGDECQLVGPAQPSHWKVLSSSGSEAAVPSVCFLVPPPNQEAQEAVTRLEAQHQALVTLWHQLHVDMKSLLAWQSLRRDVQLIRSWSLATFRTLKPEEQRQALHSLELHYQAFLRDSQDAGGFGPEDRLMAEREYGSCSHHYQQLLQSLEQGAQEESRCQRCISELKDIRLQLEACETRTVHRLRLPLDKEPARECAQRIAEQQKAQAEVEGLGKGVARLSAEAEKVLALPEPSPAAPTLRSELELTLGKLEQVRSLSAIYLEKLKTISLVIRGTQGAEEVLRAHEEQLKEAQAVPATLPELEATKASLKKLRAQAEAQQPTFDALRDELRGAQEVGERLQQRHGERDVEVERWRERVAQLLERWQAVLAQTDVRQRELEQLGRQLRYYRESADPLGAWLQDARRRQEQIQAMPLADSQAVREQLRQEQALLEEIERHGEKVEECQRFAKQYINAIKDYELQLVTYKAQLEPVASPAKKPKVQSGSESVIQEYVDLRTHYSELTTLTSQYIKFISETLRRMEEEERLAEQQRAEERERLAEVEAALEKQRQLAEAHAQAKAQAEREAKELQQRMQEEVVRREEAAVDAQQQKRSIQEELQQLRQSSEAEIQAKARQAEAAERSRLRIEEEIRVVRLQLEATERQRGGAEGELQALRARAEEAEAQKRQAQEEAERLRRQVQDESQRKRQAEVELASRVKAEAEAAREKQRALQALEELRLQAEEAERRLRQAEVERARQVQVALETAQRSAEAELQSKRASFAEKTAQLERSLQEEHVAVAQLREEAERRAQQQAEAERAREEAERELERWQLKANEALRLRLQAEEVAQQKSLAQAEAEKQKEEAEREARRRGKAEEQAVRQRELAEQELEKQRQLAEGTAQQRLAAEQELIRLRAETEQGEQQRQLLEEELARLQREAAAATQKRQELEAELAKVRAEMEVLLASKARAEEESRSTSEKSKQRLEAEAGRFRELAEEAARLRALAEEAKRQRQLAEEDAARQRAEAERVLAEKLAAIGEATRLKTEAEIALKEKEAENERLRRLAEDEAFQRRRLEEQAAQHKADIEERLAQLRKASDSELERQKGLVEDTLRQRRQVEEEILALKASFEKAAAGKAELELELGRIRSNAEDTLRSKEQAELEAARQRQLAAEEERRRREAEERVQKSLAAEEEAARQRKAALEEVERLKAKVEEARRLRERAEQESARQLQLAQEAAQKRLQAEEKAHAFAVQQKEQELQQTLQQEQSVLDQLRGEGGGGGGGGGGGDGGSAMEPGEVKDRILENISLSVKKLQSYFAACEDEIPAIRNHDKVLQRLCEHLDHALLYGLQDLSSGYWVLVVHFTRREAIKQIEVLQHVATNLGRSRAWLYLALNENSLESYLRLFQENLGLLHKYYVKNALVCSHDHLTLFLTLVSGLEFIRFELDLDAPYLDLAPYMPDYYKPQYLLDFEDRLPSSVHGSDSLSLNSFNSVTSTNLEWDDSAIAPSSEDYDFGDVFPAVPSVPSTDWEDGDLTDTVSGPRSTASDLTSSKASTRSPTQRQNPFNEEPAETVSSSDTTPVHTTSQEKEEAQALDPPDACTELEVIRVTKKKKIGKKKKSRSDEEASPLHPACSQKKCAKQGDGDSRNGSPSLGRDSPDTMLASPQEEGEGPSSTTESSERSEPGLLIPEMKDTSMERLGQPLSKVIDQLNGQLDPSTWCSRAEPPDQSFRTGSPGDAPERPPLCDFSEGLSAPMDFYRFTVESPSTVTSGGGHHDPAGLGQPLHVPSSPEAAGQEEEGGGGEGQTPRPLEDTTREAQELEAQLSLVREGPVSEPEPGTQEVLCQLKRDQPSPCLSSAEDSGVDEGQGSPSEMVHSSEFRVDNNHLLLLMIHVFRENEEQLFKMIRMSTGHMEGNLQLLYVLLTDCYVYLLRKGATEKPYLVEEAVSYNELDYVSVGLDQQTVKLVCTNRRKQFLLDTADVALAEFFLASLKSAMIKGCREPPYPSILTDATMEKLALAKFVAQESKCEASAVTVRFYGLVHWEDPTDESLGPTPCHCSPPEGTITKEGMLHYKAGTSYLGKEHWKTCFVVLSNGILYQYPDRTDVIPLLSVNMGGEQCGGCRRANTTDRPHAFQVILSDRPCLELSAESEAEMAEWMQHLCQAVSKGVIPQGVAPSPCIPCCLVLTDDRLFTCHEDCQTSFFRSLGTAKLGDISAVSTEPGKEYCVLEFSQDSQQLLPPWVIYLSCTSELDRLLSALNSGWKTIYQVDLPHTAIQEASNKKKFEDALSLIHSAWQRSDSLCRGRASRDPWC

SEQ ID NO: 1444 - protein, 3117 aa, Homo sapiens
MSQHQLRVPQPEGLGRKRTSSEDNLYLAVLRASEGKKDERDRVQKKTFTKWVNKHLIKAQRHISDLYEDLRDGHNLISLLEVLSGDSLPREKGRMRFHKLQNVQIALDYLRHRQVKLVNIRNDDIADGNPKLTLGLIWTIILHFQISDIQVSGQSEDMTAKEKLLLWSQRMVEGYQGLRCDNFTSSWRDGRLFNAIIHRHKPLLIDMNKVYRQTNLENLDQAFSVAERDLGVTRLLDPEDVDVPQPDEKSIITYVSSLYDAMPRVPDVQDGVRANELQLRWQEYRELVLLLLQWMRHHTAAFEERRFPSSFEEIEILWSQFLKFKEMELPAKEADKNRSKGIYQSLEGAVQAGQLKVPPGYHPLDVEKEWGKLHVAILEREKQLRSEFERLECLQRIVTKLQMEAGLCEEQLNQADALLQSDVRLLAAGKVPQRAGEVERDLDKADSMIRLLFNDVQTLKDGRHPQGEQMYRRVYRLHERLVAIRTEYNLRLKAGVAAPATQVAQVTLQSVQRRPELEDSTLRYLQDLLAWVEENQHRVDGAEWGVDLPSVEAQLGSHRGLHQSIEEFRAKIERARSDEGQLSPATRGAYRDCLGRLDLQYAKLLNSSKARLRSLESLHSFVAAATKELMWLNEKEEEEVGFDWSDRNTNMTAKKESYSALMRELELKEKKIKELQNAGDRLLREDHPARPTVESFQAALQTQWSWMLQLCCCIEAHLKENAAYFQFFSDVREAEGQLQKLQEALRRKYSCDRSATVTRLEDLLQDAQDEKEQLNEYKGHLSGLAKRAKAVVQLKPRHPAHPMRGRLPLLAVCDYKQVEVTVHKGDECQLVGPAQPSHWKVLSSSGSEAAVPSVCFLVPPPNQEAQEAVTRLEAQHQALVTLWHQLHVDMKSLLAWQSLRRDVQLIRSWSLATFRTLKPEEQRQALHSLELHYQAFLRDSQDAGGFGPEDRLMAEREYGSCSHHYQQLLQSLEQGAQEESRCQRCISELKDIRLQLEACETRTVHRLRLPLDKEPARECAQRIAEQQKAQAEVEGLGKGVARLSAEAEKVLALPEPSPAAPTLRSELELTLGKLEQVRSLSAIYLEKLKTISLVIRGTQGAEEVLRAHEEQLKEAQAVPATLPELEATKASLKKLRAQAEAQQPTFDALRDELRGAQEVGERLQQRHGERDVEVERWRERVAQLLERWQAVLAQTDVRQRELEQLGRQLRYYRESADPLGAWLQDARRRQEQIQAMPLADSQAVREQLRQEQALLEEIERHGEKVEECQRFAKQYINAIKDYELQLVTYKAQLEPVASPAKKPKVQSGSESVIQEYVDLRTHYSELTTLTSQYIKFISETLRRMEEEERLAEQQRAEERERLAEVEAALEKQRQLAEAHAQAKAQAEREAKELQQRMQEEVVRREEAAVDAQQQKRSIQEELQQLRQSSEAEIQAKARQAEAAERSRLRIEEEIRVVRLQLEATERQRGGAEGELQALRARAEEAEAQKRQAQEEAERLRRQVQDESQRKRQAEVELASRVKAEAEAAREKQRALQALEELRLQAEEAERRLRQAEVERARQVQVALETAQRSAEAELQSKRASFAEKTAQLERSLQEEHVAVAQLREEAERRAQQQAEAERAREEAERELERWQLKANEALRLRLQAEEVAQQKSLAQAEAEKQKEEAEREARRRGKAEEQAVRQRELAEQELEKQRQLAEGTAQQRLAAEQELIRLRAETEQGEQQRQLLEEELARLQREAAAATQKRQELEAELAKVRAEMEVLLASKARAEEESRSTSEKSKQRLEAEAGRFRELAEEAARLRALAEEAKRQRQLAEEDAARQRAEAERVLAEKLAAIGEATRLKTEAEIALKEKEAENERLRRLAEDEAFQRRRLEEQAAQHKADIEERLAQLRKASDSELERQKGLVEDTLRQRRQVEEEILALKASFEKAAAGKAELELELGRIRSNAEDTLRSKEQAELEAARQRQLAAEEERRRREAEERVQKSLAAEEEAARQRKAALEEVERLKAKVEEARRLRERAEQESARQLQLAQEAAQKRLQAEEKAHAFAVQQKEQELQQTLQQEQSVLDQLRGEGGGGGGGGGGGDGGSAMEPGEVKDRILENISLSVKKLQSYFAACEDEIPAIRNHDKVLQRLCEHLDHALLYGLQDLSSGYWVLVVHFTRREAIKQIEVLQHVATNLGRSRAWLYLALNENSLESYLRLFQENLGLLHKYYVKNALVCSHDHLTLFLTLVSGLEFIRFELDLDAPYLDLAPYMPDYYKPQYLLDFEDRLPSSVHGSDSLSLNSFNSVTSTNLEWDDSAIAPSSEDYDFGDVFPAVPSVPSTDWEDGDLTDTVSGPRSTASDLTSSKASTRSPTQRQNPFNEEPAETVSSSDTTPVHTTSQEKEEAQALDPPDACTELEVIRVTKKKKIGKKKKSRSDEEASPLHPACSQKKCAKQGDGDSRNGSPSLGRDSPDTMLASPQEEGEGPSSTTESSERSEPGLLIPEMKDTSMERLGQPLSKVIDQLNGQLDPSTWCSRAEPPDQSFRTGSPGDAPERPPLCDFSEGLSAPMDFYRFTVESPSTVTSGGGHHDPAGLGQPLHVPSSPEAAGQEEEGGGGEGQTPRPLEDTTREAQELEAQLSLVREGPVSEPEPGTQEVLCQLKRDQPSPCLSSAEDSGVDEGQGSPSEMVHSSEFRVDNNHLLLLMIHVFRENEEQLFKMIRMSTGHMEGNLQLLYVLLTDCYVYLLRKGATEKPYLVEEAVSYNELDYVSVGLDQQTVKLVCTNRRKQFLLDTADVALAEFFLASLKSAMIKGCREPPYPSILTDATMEKLALAKFVAQESKCEASAVTVRFYGLVHWEDPTDESLGPTPCHCSPPEGTITKEGMLHYKAGTSYLGKEHWKTCFVVLSNGILYQYPDRTDVIPLLSVNMGGEQCGGCRRANTTDRPHAFQVILSDRPCLELSAESEAEMAEWMQHLCQAVSKGVIPQGVAPSPCIPCCLVLTDDRLFTCHEDCQTSFFRSLGTAKLGDISAVSTEPGKEYCVLEFSQDSQQLLPPWVIYLSCTSELDRLLSALNSGWKTIYQVDLPHTAIQEASNKKKFEDALSLIHSAWQRSDSLCRGRASRDPWC

SEQ ID NO: 1445 - protein, 3144 aa, Homo sapiens
MSGEDAEVRAVSEDVSNGSSGSPSPGDTLPWNLGKTQRSRRSGGGAGSNGSVLDPAERAVIRIADERDRVQKKTFTKWVNKHLIKAQRHISDLYEDLRDGHNLISLLEVLSGDSLPREKGRMRFHKLQNVQIALDYLRHRQVKLVNIRNDDIADGNPKLTLGLIWTIILHFQISDIQVSGQSEDMTAKEKLLLWSQRMVEGYQGLRCDNFTSSWRDGRLFNAIIHRHKPLLIDMNKVYRQTNLENLDQAFSVAERDLGVTRLLDPEDVDVPQPDEKSIITYVSSLYDAMPRVPDVQDGVRANELQLRWQEYRELVLLLLQWMRHHTAAFEERRFPSSFEEIEILWSQFLKFKEMELPAKEADKNRSKGIYQSLEGAVQAGQLKVPPGYHPLDVEKEWGKLHVAILEREKQLRSEFERLECLQRIVTKLQMEAGLCEEQLNQADALLQSDVRLLAAGKVPQRAGEVERDLDKADSMIRLLFNDVQTLKDGRHPQGEQMYRRVYRLHERLVAIRTEYNLRLKAGVAAPATQVAQVTLQSVQRRPELEDSTLRYLQDLLAWVEENQHRVDGAEWGVDLPSVEAQLGSHRGLHQSIEEFRAKIERARSDEGQLSPATRGAYRDCLGRLDLQYAKLLNSSKARLRSLESLHSFVAAATKELMWLNEKEEEEVGFDWSDRNTNMTAKKESYSALMRELELKEKKIKELQNAGDRLLREDHPARPTVESFQAALQTQWSWMLQLCCCIEAHLKENAAYFQFFSDVREAEGQLQKLQEALRRKYSCDRSATVTRLEDLLQDAQDEKEQLNEYKGHLSGLAKRAKAVVQLKPRHPAHPMRGRLPLLAVCDYKQVEVTVHKGDECQLVGPAQPSHWKVLSSSGSEAAVPSVCFLVPPPNQEAQEAVTRLEAQHQALVTLWHQLHVDMKSLLAWQSLRRDVQLIRSWSLATFRTLKPEEQRQALHSLELHYQAFLRDSQDAGGFGPEDRLMAEREYGSCSHHYQQLLQSLEQGAQEESRCQRCISELKDIRLQLEACETRTVHRLRLPLDKEPARECAQRIAEQQKAQAEVEGLGKGVARLSAEAEKVLALPEPSPAAPTLRSELELTLGKLEQVRSLSAIYLEKLKTISLVIRGTQGAEEVLRAHEEQLKEAQAVPATLPELEATKASLKKLRAQAEAQQPTFDALRDELRGAQEVGERLQQRHGERDVEVERWRERVAQLLERWQAVLAQTDVRQRELEQLGRQLRYYRESADPLGAWLQDARRRQEQIQAMPLADSQAVREQLRQEQALLEEIERHGEKVEECQRFAKQYINAIKDYELQLVTYKAQLEPVASPAKKPKVQSGSESVIQEYVDLRTHYSELTTLTSQYIKFISETLRRMEEEERLAEQQRAEERERLAEVEAALEKQRQLAEAHAQAKAQAEREAKELQQRMQEEVVRREEAAVDAQQQKRSIQEELQQLRQSSEAEIQAKARQAEAAERSRLRIEEEIRVVRLQLEATERQRGGAEGELQALRARAEEAEAQKRQAQEEAERLRRQVQDESQRKRQAEVELASRVKAEAEAAREKQRALQALEELRLQAEEAERRLRQAEVERARQVQVALETAQRSAEAELQSKRASFAEKTAQLERSLQEEHVAVAQLREEAERRAQQQAEAERAREEAERELERWQLKANEALRLRLQAEEVAQQKSLAQAEAEKQKEEAEREARRRGKAEEQAVRQRELAEQELEKQRQLAEGTAQQRLAAEQELIRLRAETEQGEQQRQLLEEELARLQREAAAATQKRQELEAELAKVRAEMEVLLASKARAEEESRSTSEKSKQRLEAEAGRFRELAEEAARLRALAEEAKRQRQLAEEDAARQRAEAERVLAEKLAAIGEATRLKTEAEIALKEKEAENERLRRLAEDEAFQRRRLEEQAAQHKADIEERLAQLRKASDSELERQKGLVEDTLRQRRQVEEEILALKASFEKAAAGKAELELELGRIRSNAEDTLRSKEQAELEAARQRQLAAEEERRRREAEERVQKSLAAEEEAARQRKAALEEVERLKAKVEEARRLRERAEQESARQLQLAQEAAQKRLQAEEKAHAFAVQQKEQELQQTLQQEQSVLDQLRGEGGGGGGGGGGGDGGSAMEPGEVKDRILENISLSVKKLQSYFAACEDEIPAIRNHDKVLQRLCEHLDHALLYGLQDLSSGYWVLVVHFTRREAIKQIEVLQHVATNLGRSRAWLYLALNENSLESYLRLFQENLGLLHKYYVKNALVCSHDHLTLFLTLVSGLEFIRFELDLDAPYLDLAPYMPDYYKPQYLLDFEDRLPSSVHGSDSLSLNSFNSVTSTNLEWDDSAIAPSSEDYDFGDVFPAVPSVPSTDWEDGDLTDTVSGPRSTASDLTSSKASTRSPTQRQNPFNEEPAETVSSSDTTPVHTTSQEKEEAQALDPPDACTELEVIRVTKKKKIGKKKKSRSDEEASPLHPACSQKKCAKQGDGDSRNGSPSLGRDSPDTMLASPQEEGEGPSSTTESSERSEPGLLIPEMKDTSMERLGQPLSKVIDQLNGQLDPSTWCSRAEPPDQSFRTGSPGDAPERPPLCDFSEGLSAPMDFYRFTVESPSTVTSGGGHHDPAGLGQPLHVPSSPEAAGQEEEGGGGEGQTPRPLEDTTREAQELEAQLSLVREGPVSEPEPGTQEVLCQLKRDQPSPCLSSAEDSGVDEGQGSPSEMVHSSEFRVDNNHLLLLMIHVFRENEEQLFKMIRMSTGHMEGNLQLLYVLLTDCYVYLLRKGATEKPYLVEEAVSYNELDYVSVGLDQQTVKLVCTNRRKQFLLDTADVALAEFFLASLKSAMIKGCREPPYPSILTDATMEKLALAKFVAQESKCEASAVTVRFYGLVHWEDPTDESLGPTPCHCSPPEGTITKEGMLHYKAGTSYLGKEHWKTCFVVLSNGILYQYPDRTDVIPLLSVNMGGEQCGGCRRANTTDRPHAFQVILSDRPCLELSAESEAEMAEWMQHLCQAVSKGVIPQGVAPSPCIPCCLVLTDDRLFTCHEDCQTSFFRSLGTAKLGDISAVSTEPGKEYCVLEFSQDSQQLLPPWVIYLSCTSELDRLLSALNSGWKTIYQVDLPHTAIQEASNKKKFEDALSLIHSAWQRSDSLCRGRASRDPWC

SEQ ID NO: 1446 - protein, 237 aa, Homo sapiens
MCAERLGQFMTLALVLATFDPARGTDATNPPEGPQDRSSQQKGRLSLQNTAEIQHCLVNAGDVGCGVFECFENNSCEIRGLHGICMTFLHNAGKFDAQGKSFIKDALKCKAHALRHRFGCISRKCPAIREMVSQLQRECYLKHDLCAAAQENTRVIVEMIHFKDLLLHEPYVDLVNLLLTCGEEVKEAITHSVQVQCEQNWGSLCSILSFCTPRPPPPIAASQEANAATPAEPAAQP

SEQ ID NO: 1447 - protein, 23 aa, Homo sapiens
LAALHSTTPPPSPSEPACNLSRL

SEQ ID NO: 1448 - protein, 23 aa, Homo sapiens
LAALHSTTPPPSPSEPACNLSRL

SEQ ID NO: 1449 - protein, 697 aa, Homo sapiens
MVSHFMGSLSVLCFLLLLGFQFVCPQPSTQHRKVPQRMAAEGAPEDDGGGGAPGVWGAWGPWSACSRSCSGGVMEQTRPCLPRSYRLRGGQRPGAPARAFADHVVSAVRTSVPLHRSRDETPALAGTDASRQGPTVLRGSRHPQPQGLEVTGDRRSRTRGTIGPGKYGYGKAPYILPLQTDTAHTPQRLRRQKLSSRHSRSQGASSARHGYSSPAHQVPQHGPLYQSDSGPRSGLQAAEAPIYQLPLTHDQGYPAASSLFHSPETSNNHGVGTHGATQSFSQPARSTAISCIGAYRQYKLCNTNVCPESSRSIREVQCASYNNKPFMGRFYEWEPFAEVKGNRKCELNCQAMGYRFYVRQAEKVIDGTPCDQNGTAICVSGQCKVFHEQGILFGYRHPQSSATACILSLFQMTNETLNIWTHLLPFWFFAWRFVTALYMTDIKNDSYSWPMLVYMCTSCVYPLVSSCAHTFSSMSKNARHICYFLDYGAVNLFSLGSAIAYSAYTFPDALMCTTFHDYYVALAVLNTILSTGLSCYSRFLEIQKPRLCKVIRVLAFAYPYTWDSLPIFYRLFLFPGESAQNEATSYHQKHMIMTLLASFLYSAHLPERLAPGRFDYIGHSHQLFHVCVILATHMQMEAILLDKTLRKEWLLATSKPFSFSQIAGAILLCIIFSLSNIIYFSAALYRIPKPELHKKET

SEQ ID NO: 1450 - protein, 697 aa, Homo sapiens; identical to SEQ ID NO: 1449

SEQ ID NO: 1451 - protein, 790 aa, Homo sapiens
MVFRRFVEVGRVAYVSFGPHAGKLVAIVDVIDQNRALVDGPCTQVRRQAMPFKCMQLTDFILKFPHSAHQKYVRQAWQKADINTKWAATRWAKKIEARERKAKMTDFDRFKVMKAKKMRNRIIKNEVKKLQKAALLKASPKKAPGTKGTAAAAAAAANMGSLSQTPGHKAEQQQQQQQQQQQQHQHQQQQQQQQQQQQQQHLSRAPGLITPGSPPPAQQNQYVHISSSPQNTGRTASPPAIPVHLHPHQTMIPHTLTLGPPSQVVMQYADSGSHFVPREATKKAESSRLQQAIQAKEVLNGEMEKSRRYGAPSSADLGLGKAGGKSVPHPYESRHVVVHPSPSDYSSRDPSGVRASVMVLPNSNTPAADLEVQQATHREASPSTLNDKSGLHLGKPGHRSYALSPHTVIQTTHSASEPLPVGLPATAFYAGTQPPVIGYLSGQQQAITYAGSLPQHLVIPGTQPLLIPVGSTDMEASGAAPAIVTSSPQFAAVPHTFVTTALPKSENFNPEALVTQAAYPAMVQAQIHLPVVQSVASPAAAPPTLPPYFMKGSIIQLANGELKKVEDLKTEDFIQSAEISNDLKIDSSTVERIEDSHSPGVAVIQFAVGEHRAQVSVEVLVEYPFFVFGQGWSSCCPERTSQLFDLPCSKLSVGDVCISLTLKNLKNGSVKKGQPVDPASVLLKHSKADGLAGSRHRYAEQENGINQGSAQMLSENGELKFPEKMGLPAAPFLTKIEPSKPAATRKRRWSAPESRKLEKSEDEPPLTLPKPSLIPQEVKICIEGRSNVGK

SEQ ID NO: 1452 - protein, 790 aa, Homo sapiens; identical to SEQ ID NO: 1451

SEQ ID NO: 1453 - protein, 790 aa, Homo sapiens; identical to SEQ ID NO: 1451

SEQ ID NO: 1454 - protein, 790 aa, Homo sapiens; identical to SEQ ID NO: 1451

SEQ ID NO: 1455 - protein, 270 aa, Homo sapiens
MVFRRFVEVGRVAYVSFGPHAGKLVAIVDVIDQNRALVDGPCTQVRRQAMPFKCMQLTDFILKFPHSAHQKYVRQAWQKADINTKWAATRWAKKIEARERKAKMTDFDRFKVMKAKKMRNRIIKNEVKKLQKAALLKASPKKAPGTKGTAAAAAAAGAAAAAAAAAAAAASASAAAAAAAAAAAAAAPQQGSGAHHPGVPPTSPAEPVRPHFQFSAEHRPHRLSSGHPRPPPPPPDDDPTHAHPGAPLPGRHAIRRLRQPLCPSGGHQES

SEQ ID NO: 1456 - protein, 270 aa, Homo sapiens; identical to SEQ ID NO: 1455

SEQ ID NO: 1457 - protein, 270 aa, Homo sapiens; identical to SEQ ID NO: 1455

SEQ ID NO: 1458 - protein, 270 aa, Homo sapiens; identical to SEQ ID NO: 1455

SEQ ID NO: 1459 - protein, 270 aa, Homo sapiens; identical to SEQ ID NO: 1455

SEQ ID NO: 1460 - protein, 270 aa, Homo sapiens; identical to SEQ ID NO: 1455

SEQ ID NO: 1461 - protein, 270 aa, Homo sapiens; identical to SEQ ID NO: 1455

SEQ ID NO: 1462 - protein, 270 aa, Homo sapiens; identical to SEQ ID NO: 1455

SEQ ID NO: 1463 - protein, 195 aa, Homo sapiens
MKNLLTEKCISSHNFHQKVIKQRMEKKVDSRYFKDGAVKKPYSAKTLSNKKSSASFGIRRELPSTSHLVQYRGTHTCTRQGRLRELRIRCVARKFLYLWIRMTFGRVFPSKARFYYEQRLLRKVFEEWKEEWWVFQHEWKLCVRADCHYRLRFSLVPAVWTVPHALLDNDGSCVHFPVLLLSERPAEPRFFQNQP

SEQ ID NO: 1464 - protein, 195 aa, Homo sapiens; identical to SEQ ID NO: 1463

SEQ ID NO: 1465 - protein, 234 aa, Homo sapiens
MTTSIRQFTSSSSIKGSSGLGGGSSRTSCRLSGGLGAGSCRLGSAGGLGSTLGGSSYSSCYSFGSGGGYGSSFGGVDGLLAGGEKATMQNLNDRLASYLDKVRALEEANTELEVKIRDWYQRQAPGPARDYSQYYRTIEELQNKILTATVDNANILLQIDNARLAADDFRTKFETEQALRLSVEADINGLRRVLDELTLARADLEMQIENLKEELAYLKKNHEEEMNALRGQVH

SEQ ID NO: 1466 - protein, 234 aa, Homo sapiens; identical to SEQ ID NO: 1465

SEQ ID NO: 1467 - protein, 234 aa, Homo sapiens; identical to SEQ ID NO: 1465

SEQ ID NO: 1468 - protein, 57 aa, Homo sapiens
SAAQGAQAVAAPGSRGSSARRSEVASGGGNYGGGAGAMLWVSLGAGVLASSSERRTN

SEQ ID NO: 1469 - protein, 57 aa, Homo sapiens; identical to SEQ ID NO: 1468

SEQ ID NO: 1470 - protein, 57 aa, Homo sapiens; identical to SEQ ID NO: 1468

SEQ ID NO: 1471 - protein, 57 aa, Homo sapiens; identical to SEQ ID NO: 1468

SEQ ID NO: 1472 - protein, 57 aa, Homo sapiens; identical to SEQ ID NO: 1468

SEQ ID NO: 1473 - protein, 440 aa, Homo sapiens
MTTTFLQTSSSTFGGGSTRGGSLLAGGGGFGGGSLSGGGGSRSISASSARFVSSGSGGGYGGGMRVCGFGGGAGSVFGGGFGGGVGGGFGGGFGGGDGGLLSGNEKITMQNLNDRLASYLDKVRALEEANADLEVKIHDWYQKQTPTSPECDYSQYFKTIEELRDKIMATTIDNSRVILEIDNARLAADDFRLKYENELALRQGVEADINGLRRVLDELTLARTDLEMQIEGLNEELAYLKKNHEEEMKEFSSQLAGQVNVEMDAAPGVDLTRVLAEMREQYEAMAEKNRRDVEAWFFSKTEELNKEVASNTEMIQTSKTEITDLRRTMQELEIELQSQLSMKAGLENSLAETECRYATQLQQIQGLIGGLEAQLSELRCEMEAQNQEYKMLLDIKTRLEQEIATYRSLLEGQDAKMAGIAIREASSTTTSSSSRKSYKH

SEQ ID NO: 1474 - protein, 1676 aa, Homo sapiens
MAFPPRRRLRLGPRGLPLLLSGLLLPLCRAFNLDVDSPAEYSGPEGSYFGFAVDFFVPSASSRMFLLVGAPKANTTQPGIVEGGQVLKCDWSSTRRCQPIEFDATGNRDYAKDDPLEFKSHQWFGASVRSKQDKILACAPLYHWRTEMKQEREPVGTCFLQDGTKTVEYAPCRSQDIDADGQGFCQGGFSIDFTKADRVLLGGPGSFYWQGQLISDQVAEIVSKYDPNVYSIKYNNQLATRTAQAIFDDSYLGYSVAVGDFNGDGIDDFVSGVPRAARTLGMVYIYDGKNMSSLYNFTGEQMAAYFGFSVAATDINGDDYADVFIGAPLFMDRGSDGKLQEVGQVSVSLQRASGDFQTTKLNGFEVFARFGSAIAPLGDLDQDGFNDIAIAAPYGGEDKKGIVYIFNGRSTGLNAVPSQILEGQWAARSMPPSFGYSMKGATDIDKNGYPDLIVGAFGVDRAILYRARPVITVNAGLEVYPSILNQDNKTCSLPGTALKVSCFNVRFCLKADGKGVLPRKLNFQVELLLDKLKQKGAIRRALFLYSRSPSHSKNMTISRGGLMQCEELIAYLRSREESRKQALAAKREKRKEKRKKKKEEQKRKQEEDEENKPKENSELPEDEDEEENDEDVEQEVPIEPPSATTTTTIGISATSATFTNVFGKKRANVVTTPSTNRKNKKNKTKETPPTAHLILPEQHMSLAQQKADKNKINGEPRGGGAGGNSDSDNLDSTDCNSESSSGGKSQELNFVMDVNSSKYPSLLLHSQEEKTSTATSKTQTRLEGEVTPNSLSTSYKTVSLPLSSPNIKLNLTSPKRGQKREEGWKEVVRRSKKLSVPASVVSRIMGRGGCNITAIQDVTGAHIDVDKQKDKNGERMITIRGGTESTRYAVQLINALIQDPAKELEDLIPKNHIRTPASTKSIHANFSSGVGTTAASSKNAFPLGAPTLVTSQATTLSTFQPANKLNKNVPTNVRSSFPVSLPLAYPHPHFALLAAQTMQQIRHPRLPMAQFGGTFSPSPNTWGPFPVRPVNPGNTNSSPKHNNTSRLPNQNGTVLPSESAGLATASCPITVSSVVAASQQLCVTNTRTPSSVRKQLFACVPKTSPPATVISSVTSTCSSLPSVSSAPITSGQAPTTFLPASTSQAQLSSQKMESFSAVPPTKEKVSTQDQPMANLCTPSSTANSCSSSASNTPGAPETHPSSSPTPTSSNTQEEAQPSSVSDLSPMSMPFASNSEPAPLTLTSPRMVAADNQDTSNLPQLAVPAPRVSHRMQPRGSFYSMVPNATIHQDPQSIFVTNPVTLTPPQGPPAAVQLSSAVNIMNGSQMHINPANKSLPPTFGPATLFNHFSSLFDSSQVPANQGWGDGPLSSRVATDASFTVQSAFLGNSVLGHLENMHPDNSKAPGFRPPSQRVSTSPVGLPSIDPSGSSPSSSSAPLASFSGIPGTRVFLQGPAPVGTPSFNRQHFSPHPWTSASNSSTSAPPTLGQPKGVSASQDRKIPPPIGTERLARIRQGGSVAQAPAGTSFVAPVGHSGIWSFGVNAVSEGLSGWSQSVMGNHPMHQQLSDPSTFSQHQPMERDDSGMVAPSNIFHQPMASGFVDFSKGLPISMYGGTIIPSHPQLADVPGGPLFNGLHNPDPAWNPMIKVIQNSTECTDAQQIWPGTWAPHIGNMHLKYVN

SEQ ID NO: 1475 - protein, 1640 aa, Homo sapiens
MAFPPRRRLRLGPRGLPLLLSGLLLPLCRAFNLDVDSPAEYSGPEGSYFGFAVDFFVPSASSRMFLLVGAPKANTTQPGIVEGGQVLKCDWSSTRRCQPIEFDATGNRDYAKDDPLEFKSHQWFGASVRSKQDKILACAPLYHWRTEMKQEREPVGTCFLQDGTKTVEYAPCRSRQLISDQVAEIVSKYDPNVYSIKYNNQLATRTAQAIFDDSYLGYSVAVGDFNGDGIDDFVSGVPRAARTLGMVYIYDGKNMSSLYNFTGEQMAAYFGFSVAATDINGDDYADVFIGAPLFMDRGSDGKLQEVGQVSVSLQRASGDFQTTKLNGFEVFARFGSAIAPLGDLDQDGFNDIAIAAPYGGEDKKGIVYIFNGRSTGLNAVPSQILEGQWAARSMPPSFGYSMKGATDIDKNGYPDLIVGAFGVDRAILYRARPVITVNAGLEVYPSILNQDNKTCSLPGTALKVSCFNVRFCLKADGKGVLPRKLNFQVELLLDKLKQKGAIRRALFLYSRSPSHSKNMTISRGGLMQCEELIAYLRSREESRKQALAAKREKRKEKRKKKKEEQKRKQEEDEENKPKENSELPEDEDEEENDEDVEQEVPIEPPSATTTTTIGISATSATFTNVFGKKRANVVTTPSTNRKNKKNKTKETPPTAHLILPEQHMSLAQQKADKNKINGEPRGGGAGGNSDSDNLDSTDCNSESSSGGKSQELNFVMDVNSSKYPSLLLHSQEEKTSTATSKTQTRLEGEVTPNSLSTSYKTVSLPLSSPNIKLNLTSPKRGQKREEGWKEVVRRSKKLSVPASVVSRIMGRGGCNITAIQDVTGAHIDVDKQKDKNGERMITIRGGTESTRYAVQLINALIQDPAKELEDLIPKNHIRTPASTKSIHANFSSGVGTTAASSKNAFPLGAPTLVTSQATTLSTFQPANKLNKNVPTNVRSSFPVSLPLAYPHPHFALLAAQTMQQIRHPRLPMAQFGGTFSPSPNTWGPFPVRPVNPGNTNSSPKHNNTSRLPNQNGTVLPSESAGLATASCPITVSSVVAASQQLCVTNTRTPSSVRKQLFACVPKTSPPATVISSVTSTCSSLPSVSSAPITSGQAPTTFLPASTSQAQLSSQKMESFSAVPPTKEKVSTQDQPMANLCTPSSTANSCSSSASNTPGAPETHPSSSPTPTSSNTQEEAQPSSVSDLSPMSMPFASNSEPAPLTLTSPRMVAADNQDTSNLPQLAVPAPRVSHRMQPRGSFYSMVPNATIHQDPQSIFVTNPVTLTPPQGPPAAVQLSSAVNIMNGSQMHINPANKSLPPTFGPATLFNHFSSLFDSSQVPANQGWGDGPLSSRVATDASFTVQSAFLGNSVLGHLENMHPDNSKAPGFRPPSQRVSTSPVGLPSIDPSGSSPSSSSAPLASFSGIPGTRVFLQGPAPVGTPSFNRQHFSPHPWTSASNSSTSAPPTLGQPKGVSASQDRKIPPPIGTERLARIRQGGSVAQAPAGTSFVAPVGHSGIWSFGVNAVSEGLSGWSQSVMGNHPMHQQLSDPSTFSQHQPMERDDSGMVAPSNIFHQPMASGFVDFSKGLPISMYGGTIIPSHPQLADVPGGPLFNGLHNPDPAWNPMIKVIQNSTECTDAQQIWPGTWAPHIGNMHLKYVN

SEQ ID NO: 1476 - protein, 1630 aa, Homo sapiens
MLLGTLLLILYILMLCRMFLLVGAPKANTTQPGIVEGGQVLKCDWSSTRRCQPIEFDATGNRDYAKDDPLEFKSHQWFGASVRSKQDKILACAPLYHWRTEMKQEREPVGTCFLQDGTKTVEYAPCRSQDIDADGQGFCQGGFSIDFTKADRVLLGGPGSFYWQGQLISDQVAEIVSKYDPNVYSIKYNNQLATRTAQAIFDDSYLGYSVAVGDFNGDGIDDFVSGVPRAARTLGMVYIYDGKNMSSLYNFTGEQMAAYFGFSVAATDINGDDYADVFIGAPLFMDRGSDGKLQEVGQVSVSLQRASGDFQTTKLNGFEVFARFGSAIAPLGDLDQDGFNDIAIAAPYGGEDKKGIVYIFNGRSTGLNAVPSQILEGQWAARSMPPSFGYSMKGATDIDKNGYPDLIVGAFGVDRAILYRARPVITVNAGLEVYPSILNQDNKTCSLPGTALKVSCFNVRFCLKADGKGVLPRKLNFQVELLLDKLKQKGAIRRALFLYSRSPSHSKNMTISRGGLMQCEELIAYLRSREESRKQALAAKREKRKEKRKKKKEEQKRKQEEDEENKPKENSELPEDEDEEENDEDVEQEVPIEPPSATTTTTIGISATSATFTNVFGKKRANVVTTPSTNRKNKKNKTKETPPTAHLILPEQHMSLAQQKADKNKINGEPRGGGAGGNSDSDNLDSTDCNSESSSGGKSQELNFVMDVNSSKYPSLLLHSQEEKTSTATSKTQTRLEGEVTPNSLSTSYKTVSLPLSSPNIKLNLTSPKRGQKREEGWKEVVRRSKKLSVPASVVSRIMGRGGCNITAIQDVTGAHIDVDKQKDKNGERMITIRGGTESTRYAVQLINALIQDPAKELEDLIPKNHIRTPASTKSIHANFSSGVGTTAASSKNAFPLGAPTLVTSQATTLSTFQPANKLNKNVPTNVRSSFPVSLPLAYPHPHFALLAAQTMQQIRHPRLPMAQFGGTFSPSPNTWGPFPVRPVNPGNTNSSPKHNNTSRLPNQNGTVLPSESAGLATASCPITVSSVVAASQQLCVTNTRTPSSVRKQLFACVPKTSPPATVISSVTSTCSSLPSVSSAPITSGQAPTTFLPASTSQAQLSSQKMESFSAVPPTKEKVSTQDQPMANLCTPSSTANSCSSSASNTPGAPETHPSSSPTPTSSNTQEEAQPSSVSDLSPMSMPFASNSEPAPLTLTSPRMVAADNQDTSNLPQLAVPAPRVSHRMQPRGSFYSMVPNATIHQDPQSIFVTNPVTLTPPQGPPAAVQLSSAVNIMNGSQMHINPANKSLPPTFGPATLFNHFSSLFDSSQVPANQGWGDGPLSSRVATDASFTVQSAFLGNSVLGHLENMHPDNSKAPGFRPPSQRVSTSPVGLPSIDPSGSSPSSSSAPLASFSGIPGTRVFLQGPAPVGTPSFNRQHFSPHPWTSASNSSTSAPPTLGQPKGVSASQDRKIPPPIGTERLARIRQGGSVAQAPAGTSFVAPVGHSGIWSFGVNAVSEGLSGWSQSVMGNHPMHQQLSDPSTFSQHQPMERDDSGMVAPSNIFHQPMASGFVDFSKGLPISMYGGTIIPSHPQLADVPGGPLFNGLHNPDPAWNPMIKVIQNSTECTDAQQIWPGTWAPHIGNMHLKYVN

SEQ ID NO: 1477 - protein, 311 aa, Homo sapiens
SSGGGPGRDYSQYYRTIEELQNKILTATVDNANILLQIDNARLAADDFRTKFETEQALRLSVEADINGLRRVLDELTLARADLEMQIENLKEELAYLKKNHEEEMNALRGQVGGEINVEMDAAPGVDLSRILNEMRDQYEKMAEKNRKDAEDWFFSKTEELNREVATNSELVQSGKSEISELRRTMQALEIELQSQLSMKASLEGNLAETENRYCVQLSQIQGLIGSVEEQLAQLRCEMEQQNQEYKILLDVKTRLEQEIATYRRLLEGEDAHLTQYKKEPVTTRQVRTIVEEVQDGKVISSREQVHQTTR

SEQ ID NO: 1478 - protein, 1318 aa, Homo sapiens
MNKAPQSTGPPPAPSPGLPQPAFPPGQTAPVVFSTPQATQMNTPSQPRQHFYPSRAQPPSSAASRVQSAAPARPGPAAHVYPAGSQVMMIPSQISYPASQGAYYIPGQGRSTYVVPTQQYPVQPGAPGFYPGASPTEFGTYAGAYYPAQGVQQFPTGVAPTPVLMNQPPQIAPKRERKTIRIRDPNQGGKDITEEIMSGARTASTPTPPQTGGGLEPQANGETPQVAVIVRPDDRSQGAIIADRPGLPGPEHSPSESQPSSPSPTPSPSPVLEPGSEPNLAVLSIPGDTMTTIQMSVEESTPISRETGEPYRLSPEPTPLAEPILEVEVTLSKPVPESEFSSSPLQAPTPLASHTVEIHEPNGMVPSEDLEPEVESSPELAPPPACPSESPVPIAPTAQPEELLNGAPSPPAVDLSPVSEPEEQAKEVTASMAPPTIPSATPATAPSATSPAQEEEMEEEEEEEEGEAGEAGEAESEKGGEELLPPESTPIPANLSQNLEAAAATQVAVSVPKRRRKIKELNKKEAVGDLLDAFKEANPAVPEVENQPPAGSNPGPESEGSGVPPRPEEADETWDSKEDKIHNAENIQPGEQKYEYKSDQWKPLNLEEKKRYDREFLLGFQFIFASMQKPEGLPHISDVVLDKANKTPLRPLDPTRLQGINCGPDFTPSFANLGRTTLSTRGPPRGGPGGELPRGPAGLGPRRSQQGPRKEPRKIIATVLMTEDIKLNKAEKAWKPSSKRTAADKDRGEEDADGSKTQDLFRRVRSILNKLTPQMFQQLMKQVTQLAIDTEERLKGVIDLIFEKAISEPNFSVAYANMCRCLMALKVPTTEKPTVTVNFRKLLLNRCQKEFEKDKDDDEVFEKKQKEMDEAATAEERGRLKEELEEARDIARRRSLGNIKFIGELFKLKMLTEAIMHDCVVKLLKNHDEESLECLCRLLTTIGKDLDFEKAKPRMDQYFNQMEKIIKEKKTSSRIRFMLQDVLDLRGSNWVPRRGDQGPKTIDQIHKEAEMEEHREHIKVQQLMAKGSDKRRGGPPGPPISRGLPLVDDGGWNTVPISKGSRPIDTSRLTKITKPGSIDSNNQLFAPGGRLSWGKGSSGGSGAKPSDAASEAARPATSTLNRFSALQQAVPTESTDNRRVVQRSSLSRERGEKAGDRGDRLERSERGGDRGDRLDRARTPATKRSFSKEVEERSRERPSQPEGLRKAASLTEDRDRGRDAVKREAALPPVSPLKAALSEEELEKKSKAIIEEYLHLNDMKEAVQCVQELASPSLLFIFVRHGVESTLERSAIAREHMGQLLHQLLCAGHLSTAQYYQG

SEQ ID NO: 1479 - protein, 1318 aa, Homo sapiens; identical to SEQ ID NO: 1478

SEQ ID NO: 1480 - protein, 1154 aa, Homo sapiens
MNQPPQIAPKRERKTIRIRDPNQGGKDITEEIMSGARTASTPTPPQTGGGLEPQANGETPQVAVIVRPDDRSQGAIIADRPGLPGPEHSPSESQPSSPSPTPSPSPVLEPGSEPNLAVLSIPGDTMTTIQMSVEESTPISRETGEPYRLSPEPTPLAEPILEVEVTLSKPVPESEFSSSPLQAPTPLASHTVEIHEPNGMVPSEDLEPEVESSPELAPPPACPSESPVPIAPTAQPEELLNGAPSPPAVDLSPVSEPEEQAKEVTASMAPPTIPSATPATAPSATSPAQEEEMEEEEEEEEGEAGEAGEAESEKGGEELLPPESTPIPANLSQNLEAAAATQVAVSVPKRRRKIKELNKKEAVGDLLDAFKEANPAVPEVENQPPAGSNPGPESEGSGVPPRPEEADETWDSKEDKIHNAENIQPGEQKYEYKSDQWKPLNLEEKKRYDREFLLGFQFIFASMQKPEGLPHISDVVLDKANKTPLRPLDPTRLQGINCGPDFTPSFANLGRTTLSTRGPPRGGPGGELPRGPAGLGPRRSQQGPRKEPRKIIATVLMTEDIKLNKAEKAWKPSSKRTAADKDRGEEDADGSKTQDLFRRVRSILNKLTPQMFQQLMKQVTQLAIDTEERLKGVIDLIFEKAISEPNFSVAYANMCRCLMALKVPTTEKPTVTVNFRKLLLNRCQKEFEKDKDDDEVFEKKQKEMDEAATAEERGRLKEELEEARDIARRRSLGNIKFIGELFKLKMLTEAIMHDCVVKLLKNHDEESLECLCRLLTTIGKDLDFEKAKPRMDQYFNQMEKIIKEKKTSSRIRFMLQDVLDLRGSNWVPRRGDQGPKTIDQIHKEAEMEEHREHIKVQQLMAKGSDKRRGGPPGPPISRGLPLVDDGGWNTVPISKGSRPIDTSRLTKITKPGSIDSNNQLFAPGGRLSWGKGSSGGSGAKPSDAASEAARPATSTLNRFSALQQAVPTESTDNRRVVQRSSLSRERGEKAGDRGDRLERSERGGDRGDRLDRARTPATKRSFSKEVEERSRERPSQPEGLRKAASLTEDRDRGRDAVKREAALPPVSPLKAALSEEELEKKSKAIIEEYLHLNDMKEAVQCVQELASPSLLFIFVRHGVESTLERSAIAREHMGQLLHQLLCAGHLSTAQYYQG

SEQ ID NO: 1481 - protein, 1231 aa, Homo sapiens
MMIPSQISYPASQGAYYIPGQGRSTYVVPTQQYPVQPGAPGFYPGASPTEFGTYAGAYYPAQGVQQFPTGVAPTPVLMNQPPQIAPKRERKTIRIRDPNQGGKDITEEIMSGARTASTPTPPQTGGGLEPQANGETPQVAVIVRPDDRSQGAIIADRPGLPGPEHSPSESQPSSPSPTPSPSPVLEPGSEPNLAVLSIPGDTMTTIQMSVEESTPISRETGEPYRLSPEPTPLAEPILEVEVTLSKPVPESEFSSSPLQAPTPLASHTVEIHEPNGMVPSEDLEPEVESSPELAPPPACPSESPVPIAPTAQPEELLNGAPSPPAVDLSPVSEPEEQAKEVTASMAPPTIPSATPATAPSATSPAQEEEMEEEEEEEEGEAGEAGEAESEKGGEELLPPESTPIPANLSQNLEAAAATQVAVSVPKRRRKIKELNKKEAVGDLLDAFKEANPAVPEVENQPPAGSNPGPESEGSGVPPRPEEADETWDSKEDKIHNAENIQPGEQKYEYKSDQWKPLNLEEKKRYDREFLLGFQFIFASMQKPEGLPHISDVVLDKANKTPLRPLDPTRLQGINCGPDFTPSFANLGRTTLSTRGPPRGGPGGELPRGPAGLGPRRSQQGPRKEPRKIIATVLMTEDIKLNKAEKAWKPSSKRTAADKDRGEEDADGSKTQDLFRRVRSILNKLTPQMFQQLMKQVTQLAIDTEERLKGVIDLIFEKAISEPNFSVAYANMCRCLMALKVPTTEKPTVTVNFRKLLLNRCQKEFEKDKDDDEVFEKKQKEMDEAATAEERGRLKEELEEARDIARRRSLGNIKFIGELFKLKMLTEAIMHDCVVKLLKNHDEESLECLCRLLTTIGKDLDFEKAKPRMDQYFNQMEKIIKEKKTSSRIRFMLQDVLDLRGSNWVPRRGDQGPKTIDQIHKEAEMEEHREHIKVQQLMAKGSDKRRGGPPGPPISRGLPLVDDGGWNTVPISKGSRPIDTSRLTKITKPGSIDSNNQLFAPGGRLSWGKGSSGGSGAKPSDAASEAARPATSTLNRFSALQQAVPTESTDNRRVVQRSSLSRERGEKAGDRGDRLERSERGGDRGDRLDRARTPATKRSFSKEVEERSRERPSQPEGLRKAASLTEDRDRGRDAVKREAALPPVSPLKAALSEEELEKKSKAIIEEYLHLNDMKEAVQCVQELASPSLLFIFVRHGVESTLERSAIAREHMGQLLHQLLCAGHLSTAQYYQG

SEQ ID NO: 1482 - protein, 1318 aa, Homo sapiens; identical to SEQ ID NO: 1478

SEQ ID NO: 1483 - protein, 1256 aa, Homo sapiens
MNKAPQSTGPPPAPSPGLPQPAFPPGQTAPVVFSTPQATQMNTPSQPRQHFYPSRAQPPSSAASRVQSAAPARPGPAAHVYPAGSQVMMIPSQISYPASQGAYYIPGQGRSTYVVPTQQYPVQPGAPGFYPGASPTEFGTYAGAYYPAQGVQQFPTGVAPTPVLMNQPPQIAPKRERKTIRIRDPNQGGKDITEEIMSGARTASTPTPPQTGGGLEPQANGETPQVAVIVRPDDRSQGAIIADRPGLPGPEHSPSESQPSSPSPTPSPSPVLEPGSEPNLAVLSIPGDTMTTIQMSVEESTPISRETGEPYRLSPEPTPLAEPILEVEVTLSKPVPESEFSSSPLQAPTPLASHTVEIHEPNGMVPSEDLEPEVESSPELAPPPACPSESPVPIAPTAQPEELLNGAPSPPAVDLSPVSEPEEQAKEVTASMAPPTIPSATPATAPSATSPAQEEEMEEEEEEEEGEAGEAGEAESEKGGEELLPPESTPIPANLSQNLEAAAATQVAVSVPKRRRKIKELNKKEAVGDLLDAFKEANPAVPEVENQPPAGSNPGPESEGSGVPPRPEEADETWDSKEDKIHNAENIQPGEQKYEYKSDQWKPLNLEEKKRYDREFLLGFQFIFASMQKPEGLPHISDVVLDKANKTPLRPLDPTRLQGINCGPDFTPSFANLGRTTLSTRGPPRGGPGGELPRGPDLFRRVRSILNKLTPQMFQQLMKQVTQLAIDTEERLKGVIDLIFEKAISEPNFSVAYANMCRCLMALKVPTTEKPTVTVNFRKLLLNRCQKEFEKDKDDDEVFEKKQKEMDEAATAEERGRLKEELEEARDIARRRSLGNIKFIGELFKLKMLTEAIMHDCVVKLLKNHDEESLECLCRLLTTIGKDLDFEKAKPRMDQYFNQMEKIIKEKKTSSRIRFMLQDVLDLRGSNWVPRRGDQGPKTIDQIHKEAEMEEHREHIKVQQLMAKGSDKRRGGPPGPPISRGLPLVDDGGWNTVPISKGSRPIDTSRLTKITKPGSIDSNNQLFAPGGRLSWGKGSSGGSGAKPSDAASEAARPATSTLNRFSALQQAVPTESTDNRRVVQRSSLSRERGEKAGDRGDRLERSERGGDRGDRLDRARTPATKRSFSKEVEERSRERPSQPEGLRKAASLTEDRDRGRDAVKREAALPPVSPLKAALSEEELEKKSKAIIEEYLHLNDMKEAVQCVQELASPSLLFIFVRHGVESTLERSAIAREHMGQLLHQLLCAGHLSTAQYYQG

SEQ ID NO: 1484 - protein, 1046 aa, Homo sapiens
TGGGLEPQANGETPQVAVIVRPDDRSQGAIIADRPGLPGPEHSPSESQPSSPSPTPSPSPVLEPGSEPNLAVLSIPGDTMTTIQMSVEESTPISRETGEPYRLSPEPTPLAEPILEVEVTLSKPVPESEFSSSPLQAPTPLASHTVEIHEPNGMVPSEDLEPEVESSPELAPPPACPSESPVPIAPTAQPEELLNGAPSPPAVDLSPVSEPEEQAKEVTASMAPPTIPSATPATAPSATSPAQEEEMEEEEEEEEGEAGEAGEAESEKGGEELLPPESTPIPANLSQNLEAAAATQVAVSVPKRRRKIKELNKKEAVGDLLDAFKEANPAVPEVENQPPAGSNPGPESEGSGVPPRPEEADETWDSKEDKIHNAENIQPGEQKYEYKSDQWKPLNLEEKKRYDREFLLGFQFIFASMQKPEGLPHISDVVLDKANKTPLRPLDPTRLQGINCGPDFTPSFANLGRTTLSTRGPPRGGPGGELPRGPDLFRRVRSILNKLTPQMFQQLMKQVTQLAIDTEERLKGVIDLIFEKAISEPNFSVAYANMCRCLMALKVPTTEKPTVTVNFRKLLLNRCQKEFEKDKDDDEVFEKKQKEMDEAATAEERGRLKEELEEARDIARRRSLGNIKFIGELFKLKMLTEAIMHDCVVKLLKNHDEESLECLCRLLTTIGKDLDFEKAKPRMDQYFNQMEKIIKEKKTSSRIRFMLQDVLDLRGSNWVPRRGDQGPKTIDQIHKEAEMEEHREHIKVQQLMAKGSDKRRGGPPGPPISRGLPLVDDGGWNTVPISKGSRPIDTSRLTKITKPGSIDSNNQLFAPGGRLSWGKGSSGGSGAKPSDAASEAARPATSTLNRFSALQQAVPTESTDNRRVVQRSSLSRERGEKAGDRGDRLERSERGGDRGDRLDRARTPATKRSFSKEVEERSRERPSQPEGLRKAASLTEDRDRGRDAVKREAALPPVSPLKAALSEEELEKKSKAIIEEYLHLNDMKEAVQCVQELASPSLLFIFVRHGVESTLERSAIAREHMGQLLHQLLCAGHLSTAQYYQG

SEQ ID NO: 1485 - protein, 1113 aa, Homo sapiens
MPEEVHHGEEEVETFAFQAEIAQLMSLIINTFYSNKEIFLRELISNASDALDKIRYESLTDPSKLDSGKELKIDIIPNPQERTLTLVDTGIGMTKADLINNLGTIAKSGTKAFMEALQAGADISMIGQFGVGFYSAYLVAEKVVVITKHNDDEQYAWESSAGGSFTVRADHGEPIGRGTKVILHLKEDQTEYLEERRVKEVVKKHSQFIGYPITLYLEKEREKEISDDEAEEEKGEKEEEDKDDEEKPKIEDVGSDEEDDSGKDKKKKTKKIKEKYIDQEELNKTKPIWTRNPDDITQEEYGEFYKSLTNDWEDHLAVKHFSVEGQLEFRALLFIPRRAPFDLFENKKKKNNIKLYVRRVFIMDSCDELIPEYLNFIRGVVDSEDLPLNISREMLQQSKILKVIRKNIVKKCLELFSELAEDKENYKKFYEAFSKNLKLGIHEDSTNRRRLSELLRYHTSQSGDEMTSLSEYVSRMKETQKSIYYITGESKEQVANSAFVERVRKRGFEVVYMTEPIDEYCVQQLKEFDGKSLVSVTKEGLAALSSPGTMASTSTTIRSHSSSRRGFSANSARLPGVSRSGFSSVSVSRSRGSGGLGGACGGAGFGSRSLYGLGGSKRISIGGGSCAISGGYGSRAGGSYGFGGAGSGFGFGGGAGIGFGLGGGAGLAGGFGGPGFPVCPPGGIQEVTVNQSLLTPLNLQIDPTIQRVRAEEREQIKTLNNKFASFIDKVRFLEQQNKVLETKWTLLQEQGTKTVRQNLEPLFEQYINNLRRQLDSIVGERGRLDSELRGMQDLVEDFKNKYEDEINKRTAAENEFVTLKKDVDAAYMNKVELQAKADTLTDEINFLRALYDAELSQMQTHISDTSVVLSMDNNRNLDLDSIIAEVKAQYEEIAQRSRAEAESWYQTKYEELQVTAGRHGDDLRNTKQEIAEINRMIQRLRSEIDHVKKQCANLQAAIADAEQRGEMALKDAKNKLEGLEDALQKAKQDLARLLKEYQELMNVKLALDVEIATYRKLLEGEECRLNGEGVGQVNISVVQSTVSSGYGGASGVGSGLGLGGGSSYSYGSGLGVGGGFSSSSGRAIGGGLSSVGGGSSTIKYTTTSSSSRKSYKH

SEQ ID NO: 1486 - protein, 33 aa, Homo sapiens
VKDWGPATGLSCPLKRSAILATQKPGAGKPQLA

SEQ ID NO: 1487 - protein, 33 aa, Homo sapiens; identical to SEQ ID NO: 1486

SEQ ID NO: 1488 - protein, 33 aa, Homo sapiens; identical to SEQ ID NO: 1486

SEQ ID NO: 1489 - protein, 33 aa, Homo sapiens; identical to SEQ ID NO: 1486

SEQ ID NO: 1490 - protein, 1203 aa, Homo sapiens
MFSFVDLRLLLLLAATALLTHGQEEGQVEGQDEDIPPITCVQNGLRYHDRDVWKPEPCRICVCDNGKVLCDDVICDETKNCPGAEVPEGECCPVCPDGSESPTDQETTGVEGPKGDTGPRGPRGPAGPPGRDGIPGQPGLPGPPGPPGPPGPPGLGGNFAPQLSYGYDEKSTGGISVPGPMGPSGPRGLPGPPGAPGPQGFQGPPGEPGEPGASGPMGPRGPPGPPGKNGDDGEAGKPGRPGERGPPGPQGARGLPGTAGLPGMKGHRGFSGLDGAKGDAGPAGPKGEPGSPGENGAPGQMGPRGLPGERGRPGAPGPAGARGNDGATGAAGPPGPTGPAGPPGFPGAVGAKGEAGPQGPRGSEGPQGVRGEPGPPGPAGAAGPAGNPGADGQPGAKGANGAPGIAGAPGFPGARGPSGPQGPGGPPGPKGNSGEPGAPGSKGDTGAKGEPGPVGVQGPPGPAGEEGKRGARGEPGPTGLPGPPGERGGPGSRGFPGADGVAGPKGPAGERGSPGPAGPKGSPGEAGRPGEAGLPGAKGLTGSPGSPGPDGKTGPPGPAGQDGRPGPPGPPGARGQAGVMGFPGPKGAAGEPGKAGERGVPGPPGAVGPAGKDGEAGAQGPPGPAGPAGERGEQGPAGSPGFQGLPGPAGPPGEAGKPGEQGVPGDLGAPGPSGARGERGFPGERGVQGPPGPAGPRGANGAPGNDGAKGDAGAPGAPGSQGAPGLQGMPGERGAAGLPGPKGDRGDAGPKGADGSPGKDGVRGLTGPIGPPGPAGAPGDKGESGPSGPAGPTGARGAPGDRGEPGPPGPAGFAGPPGADGQPGAKGEPGDAGAKGDAGPPGPAGPAGPPGPIGNVGAPGAKGARGSAGPPGATGFPGAAGRVGPPGPSGNAGPPGPPGPAGKEGGKGPRGETGPAGRPGEVGPPGPPGPAGEKGSPGADGPAGAPGTPGPQGIAGQRGVVGLPGQRGERGFPGLPGPSGEPGKQGPSGASGERGPPGPMGPPGLAGPPGESGREGAPGAEGSPGRDGSPGAKGDRGETGPAGPPGAPGAPGAPGPVGPAGKSGDRGETGPAGPTGPVGPVGAPPGRPRPPFGPGLAAAATEPGWAASLSPRVGAARQGQPSTTGSPAVSRLTGRCCVGGAALAWVCMWVQPWEHCGSASQEPWRSRSLKTQWWHWWAPMPPCAAPSPLSLASAWHSSTSSGS

SEQ ID NO: 1491 - protein, 1203 aa, Homo sapiens; identical to SEQ ID NO: 1490

SEQ ID NO: 1492 - protein, 1203 aa, Homo sapiens; identical to SEQ ID NO: 1490

SEQ ID NO: 1493 - protein, 1203 aa, Homo sapiens; identical to SEQ ID NO: 1490

SEQ ID NO: 1494 - protein, 456 aa, Homo sapiens
MRLTPRALCSAAQAAWRENFPLCGRDVARWFPGHMAKGLKKMQSSLKLVDCIIEVHDARIPLSGRNPLFQETLGLKPHLLVLNKMDLADLTEQQKIMQHLEGEGLKNVIFTNCVKDENVKQIIPMVTELIGRSHRYHRKENLEYCIMVIGVPNVGKSSLINSLRRQHLRKGKATRVGGEPGITRAVMSKIQVSERPLMFLLDTPGVLAPRIESVETGLKLALCGTVLDHLVGEETMADYLLYTLNKHQRFGWTRCSEAGVQTQHVRRSGVGPTPRGMGIRVQPGVDAGRGLCRVQAAGLRPCRGRPQVCPAAWRDGPALASQRVLPGQRVLPLGVQPWLMVPEPVPPRMGGGRAVLQRHFPGAPAGEGPQSLRGTPRDQKREWGGPPLCPACGGGHGVLPGAGVRPCAPGPPPGRGRRQEVPGLQGYRAHHPQLQTGQQLPQRLRPAAGRRGGLLR

SEQ ID NO: 1495 - protein, 456 aa, Homo sapiens; identical to SEQ ID NO: 1494

SEQ ID NO: 1496 - protein, 456 aa, Homo sapiens; identical to SEQ ID NO: 1494

SEQ ID NO: 1497 - protein, 1041 aa, Homo sapiens
MAPHWAVWLLAARLWGLGIGAEVWWNLVPRKTVSSGELATVVRRFSQTGIQDFLTLTLTEPTGLLYVGAREALFAFSMEALELQGAISWEAPVEKKTECIQKGKNNQTECFNFIRFLQPYNASHLYVCGTYAFQPKCTYVNMLTFTLEHGEFEDGKGKCPYDPAKGHAGLLVDGELYSATLNNFLGTEPIILRNMGPHHSMKTEYLAFWLNEPHFVGSAYVPESVGSFTGDDDKVYFFFRERAVESDCYAEQVVARVARVCKGDMGGARTLQRKWTTFLKARLACSAPNWQLYFNQLQAMHTLQDTSWHNTTFFGVFQAQWGDMYLSAICEYQLEEIQRVFEGPYKEYHEEAQKWDRYTDPVPSPRPGSCINNWHRRHGYTSSLELPDNILNFVKKHPLMEEQVGPRWSRPLLVKKGTNFTHLVADRVTGLDGATYTVLFIGTGDGWLLKAVSLGPWVHLIEELQLFDQEPMRSLVLSQSKKLLFAGSRSQLVQLPVADCMKYRSCADCVLARDPYCAWSVNTSRCVAVGGHSGSLLIQHVMTSDTSGICNLRGSKKVRPTPKNITVVAGTDLVLPCHLSSNLAHARWTFGGRDLPAEQPGSFLYDARLQALVVMAAQPRHAGAYHCFSEEQGARLAAEGYLVAVVAGPSVTLEARAPLENLGLVWLAVVALGAVCLVLLLLVLSLRRRLREELEKGAKATERTLVYPLEGSLGSKKGVNLPGAAVDLPAVSEKDIQDLKFGVEQDVDMVFASFIRKASDVHEVRKVLGEKGKNIKIISKIENHEGVRRFDEILEASDGIMVARGDLGIEIPAEKVFLAQKMMIGRCNRAGKPVICATQMLESMIKKPRPTRAEGSDVANAVLDGADCIMLSGETAKGDYPLEAVRMQHLIAREAEAAIYHLQLFEELRRLAPITSDPTEATAVGAVEASFKCCSGAIIVLTKSGRSAHQVARYRPRAPIIAVTRNPQTARQAHLYRGIFPVLCKDPVQEAWAEDVDLRVNFAMNVGKARGFFKKGDVVIVLTGWRPGSGFTNTMRVVPVP

SEQ ID NO: 1498 - protein, 1041 aa, Homo sapiens
MAPHWAVWLLAARLWGLGIGAEVWWNLVPRKTVSSGELATVVRRFSQTGIQDFLTLTLTEPTGLLYVGAREALFAFSMEALELQGAISWEAPVEKKTECIQKGKNNQTECFNFIRFLQPYNASHLYVCGTYAFQPKCTYVNMLTFTLEHGEFEDGKGKCPYDPAKGHAGLLVDGELYSATLNNFLGTEPIILRNMGPHHSMKTEYLAFWLNEPHFVGSAYVPESVGSFTGDDDKVYFFFRERAVESDCYAEQVVARVARVCKGDMGGARTLQRKWTTFLKARLACSAPNWQLYFNQLQAMHTLQDTSWHNTTFFGVFQAQWGDMYLSAICEYQLEEIQRVFEGPYKEYHEEAQKWDRYTDPVPSPRPGSCINNWHRRHGYTSSLELPDNILNFVKKHPLMEEQVGPRWSRPLLVKKGTNFTHLVADRVTGLDGATYTVLFIGTGDGWLLKAVSLGPWVHLIEELQLFDQEPMRSLVLSQSKKLLFAGSRSQLVQLPVADCMKYRSCADCVLARDPYCAWSVNTSRCVAVGGHSGSLLIQHVMTSDTSGICNLRGSKKVRPTPKNITVVAGTDLVLPCHLSSNLAHARWTFGGRDLPAEQPGSFLYDARLQALVVMAAQPRHAGAYHCFSEEQGARLAAEGYLVAVVAGPSVTLEARAPLENLGLVWLAVVALGAVCLVLLLLVLSLRRRLREELEKGAKATERTLVYPLEGSLGSKKGVNLPGAAVDLPAVSEKDIQDLKFGVEQDVDMVFASFIRKASDVHEVRKVLGEKGKNIKIISKIENHEGVRRFDEILEASDGIMVARGDLGIEIPAEKVFLAQKMMIGRCNRAGKPVICATQMLESMIKKPRPTRAEGSDVANAVLDGADCIMLSGETAKGDYPLEAVRMQHLIAREAEAAMFHRKLFEELVRASSHSTDLMEAMAMGSVEASYKCLAAALIVLTESGRSAHQVARYRPRAPIIAVTRNPQTARQAHLYRGIFPVLCKDPVQEAWAEDVDLRVNFAMNVGKARGFFKKGDVVIVLTGWRPGSGFTNTMRVVPVP

SEQ ID NO: 1499 - protein, 1041 aa, Homo sapiens; identical to SEQ ID NO: 1498

SEQ ID NO: 1500 - protein, 353 aa, Homo sapiens
MPYQYPALTPEQKKELSDIAHRIVAPGKGILAADESTGSIAKRLQSIGTENTEENRRFYRQLLLTADDRVNPCIGGVILFHETLYQKADDGRPFPQVIKSKGGVVGIKVDKGVVPLAGTNGETTTQGLDGLSERCAQYKKDGADFAKWRCVLKIGEHTPSALAIMENANVLARYASICQQNGIVPIVEPEILPDGDHDLKRCQYVTEKVLAAVYKALSDHHIYLEGTLLKPNMVTPGHACTQKFSHEEIAMATVTALRRTVPPAVTGITFLSGGQSEEEASINLNAINKCPLLKPWALTFSYGRALQASALTALPRMVNIYVDIYFSSDIPREPQSSQAPFCQGGGFSLSCHL

SEQ ID NO: 1501 - protein, 353 aa, Homo sapiens; identical to SEQ ID NO: 1500

SEQ ID NO: 1502 - protein, 353 aa, Homo sapiens; identical to SEQ ID NO: 1500

SEQ ID NO: 1503 - protein, 353 aa, Homo sapiens; identical to SEQ ID NO: 1500

SEQ ID NO: 1504 - protein, 1850 aa, Homo sapiens
MSGSTQPVAQTWRATEPRYPPHSLSYPVQIARTHTDVGLLEYQHHSRDYASHLSPGSIIQPQRRRPSLLSEFQPGNERSQELHLRPESHSYLPELGKSEMEFIESKRPRLELLPDPLLRPSPLLATGQPAGSEDLTKDRSLTGKLEPVSPPSPPHTDPELELVPPRLSKEELIQNMDRVDREITMVEQQISKLKKKQQQLEEEAAKPPEPEKPVSPPPIESKHRSLVQIIYDENRKKAEAAHRILEGLGPQVELPLYNQPSDTRQYHENIKINQAMRKKLILYFKRRNHARKQWEQKFCQRYDQLMEAWEKKVERIENNPRRRAKESKVREYYEKQFPEIRKQRELQERMQSRVGQRGSGLSMSAARSEHEVSEIIDGLSEQENLEKQMRQLAVIPPMLYDADQQRIKFINMNGLMADPMKVYKDRQVMNMWSEQEKETFREKFMQHPKNFGLIASFLERKTVAECVLYYYLTKKNENYKSLVRRSYRRRGKSQQQQQQQQQQQQQQQQQPMPRSSQEEKDEKEKEKEAEKEEEKPEVENDKEDLLKEKTDDTSGEDNDEKEAVASKGRKTANSQGRRKGRITRSMANEANSEEAITPQQSAELASMELNESSRWTEEEMETAKKGLLEHGRNWSAIARMVGSKTVSQCKNFYFNYKKRQNLDEILQQHKLKMEKERNARRKKKKAPAAASEEAAFPPVVEDEEMEASGVSGNEEEMVEEAEATVNNSSDTESIPSPHTEAAKDTGQNGPKPPATLGADGPPPGPPTPPPEDIPAPTEPTPASEATGAPTPPPAPPSPSAPPPVVPKEEKEEETAAAPPVEEGEEQKPPAAEELAVDTGKAEEPVKSECTEEAEEGPAKGKDAEAAEATAEGALKAEKKEGGSGRATTAKSSGAPQDSDSSATCSADEVDEAEGGDKNRLLSPRPSLLTPTGDPRANASPQKPLDLKQLKQRAAAIPPIQVTKVHEPPREDAAPTKPAPPAPPPPQNLQPESDAPQQPGSSPRGKSRSPAPPADKEAEKPVFFPAFAAEAQKLPGDPPCWTSGLPFPVPPREVIKASPHAPDPSAFSYAPPGHPLPLGLHDTARPVLPRPPTISNPPPLISSAKHPSVLERQIGAISQGMSVQLHVPYSEHAKAPVGPVTMGLPLPMDPKKLAPFSGVKQEQLSPRGQAGPPESLGVPTAQEASVLRGTALGSVPGGSITKGIPSTRVPSDSAITYRGSITHGTPADVLYKGTITRIIGEDSPSRLDRGREDSLPKGHVIYEGKKGHVLSYEGGMSVTQCSKEDGRSSSGPPHETAAPKRTYDMMEGRVGRAISSASIEGLMGRAIPPERHSPHHLKEQHHIRGSITQGIPRSYVEAQEDYLRREAKLLKREGTPPPPPPSRDLTEAYKTQALGPLKLKPAHEGLVATVKEAGRSIHEIPREELRHTPELPLAPRPLKEGSITQGTPLKYDTGASTTGSKKHDVRSLIGSPGRTFPPVHPLDVMADARALERACYEESLKSRPGTASSSGGSIARGAPVIVPELGKPRQSPLTYEDHGAPFAGHLPRGSPVTTREPTPRLQEGSLSSSKASQDRKLTSTPREIAKSPHSTVPEHHPHPISPYEHLLRGVSGVDLYRSHIPLAFDPTSIPRGIPLDAAAAYYLPRHLAPNPTYPHLYPPYLIRGYPDTAALENRQTIINDYITSQQMHHNAATAMAQRADMLRGLSPRESSLALNYAAGPRGIIDLSQVPHLPVLVPPTPGTPATAMDRLAYLPTAPQPFSSRHSSSPLSPGGPTHLTKPTTTSSSERERDRDRERDRDREREKSILTSTTTVEHAPIWRPGTEQSSGSSGGGGGPPLPQPKLLPKPPSLA

SEQ ID NO: 1505 - protein, 1850 aa, Homo sapiens; identical to SEQ ID NO: 1504

SEQ ID NO: 1506 - protein, 1850 aa, Homo sapiens; identical to SEQ ID NO: 1504

SEQ ID NO: 1507 - protein, 1850 aa, Homo sapiens; identical to SEQ ID NO: 1504

SEQ ID NO: 1508 - protein, 1850 aa, Homo sapiens; identical to SEQ ID NO: 1504

SEQ ID NO: 1509 - protein, 1866 aa, Homo sapiens
MSGSTQPVAQTWRATEPRYPPHSLSYPVQIARTHTDVGLLEYQHHSRDYASHLSPGSIIQPQRRRPSLLSEFQPGNERSQELHLRPESHSYLPELGKSEMEFIESKRPRLELLPDPLLRPSPLLATGQPAGSEDLTKDRSLTGKLEPVSPPSPPHTDPELELVPPRLSKEELIQNMDRVDREITMVEQQISKLKKKQQQLEEEAAKPPEPEKPVSPPPIESKHRSLVQIIYDENRKKAEAAHRILEGLGPQVELPLYNQPSDTRQYHENIKINQAMRKKLILYFKRRNHARKQWEQKFCQRYDQLMEAWEKKVERIENNPRRRAKESKVREYYEKQFPEIRKQRELQERMQSRVGQRGSGLSMSAARSEHEVSEIIDGLSEQENLEKQMRQLAVIPPMLYDADQQRIKFINMNGLMADPMKVYKDRQVMNMWSEQEKETFREKFMQHPKNFGLIASFLERKTVAECVLYYYLTKKNENYKSLVRRSYRRRGKSQQQQQQQQQQQQQQQQQPMPRSSQEEKDEKEKEKEAEKEEEKPEVENDKEDLLKEKTDDTSGEDNDEKEAVASKGRKTANSQGRRKGRITRSMANEANSEEAITPQQSAELASMELNESSRWTEEEMETAKKGLLEHGRNWSAIARMVGSKTVSQCKNFYFNYKKRQNLDEILQQHKLKMEKERNARRKKKKAPAAASEEAAFPPVVEDEEMEASGVSGNEEEMVEEAEALHASGNEVPRGECSGPATVNNSSDTESIPSPHTEAAKDTGQNGPKPPATLGADGPPPGPPTPPPEDIPAPTEPTPASEATGAPTPPPAPPSPSAPPPVVPKEEKEEETAAAPPVEEGEEQKPPAAEELAVDTGKAEEPVKSECTEEAEEGPAKGKDAEAAEATAEGALKAEKKEGGSGRATTAKSSGAPQDSDSSATCSADEVDEAEGGDKNRLLSPRPSLLTPTGDPRANASPQKPLDLKQLKQRAAAIPPIVTKVHEPPREDAAPTKPAPPAPPPPQNLQPESDAPQQPGSSPRGKSRSPAPPADKEAEKPVFFPAFAAEAQKLPGDPPCWTSGLPFPVPPREVIKASPHAPDPSAFSYAPPGHPLPLGLHDTARPVLPRPPTISNPPPLISSAKHPSVLERQIGAISQGMSVQLHVPYSEHAKAPVGPVTMGLPLPMDPKKLAPFSGVKQEQLSPRGQAGPPESLGVPTAQEASVLRGTALGSVPGGSITKGIPSTRVPSDSAITYRGSITHGTPADVLYKGTITRIIGEDSPSRLDRGREDSLPKGHVIYEGKKGHVLSYEGGMSVTQCSKEDGRSSSGPPHETAAPKRTYDMMEGRVGRAISSASIEGLMGRAIPPERHSPHHLKEQHHIRGSITQGIPRSYVEAQEDYLRREAKLLKREGTPPPPPPSRDLTEAYKTQALGPLKLKPAHEGLVATVKEAGRSIHEIPREELRHTPELPLAPRPLKEGSITQGTPLKYDTGASTTGSKKHDVRSLIGSPGRTFPPVHPLDVMADARALERACYEESLKSRPGTASSSGGSIARGAPVIVPELGKPRQSPLTYEDHGAPFAGHLPRGSPVTTREPTPRLQEGSLSSSKASQDRKLTSTPREIAKSPHSTVPEHHPHPISPYEHLLRGVSGVDLYRSHIPLAFDPTSIPRGIPLDAAAAYYLPRHLAPNPTYPHLYPPYLIRGYPDTAALENRQTIINDYITSQQMHHNAATAMAQRADMLRGLSPRESSLALNYAAGPRGIIDLSQVPHLPVLVPPTPGTPATAMDRLAYLPTAPQPFSSRHSSSPLSPGGPTHLTKPTTTSSSERERDRDRERDRDREREKSILTSTTTVEHAPIWRPGTEQSSGSSGGGGGPPLPQPKLLPKPPSLA

SEQ ID NO: 1510 - protein, 1866 aa, Homo sapiens; identical to SEQ ID NO: 1509

SEQ ID NO: 1511 - protein, 1866 aa, Homo sapiens; identical to SEQ ID NO: 1509

SEQ ID NO: 1512 - protein, 1866 aa, Homo sapiens; identical to SEQ ID NO: 1509

SEQ ID NO: 1513 - protein, 1866 aa, Homo sapiens; identical to SEQ ID NO: 1509

SEQ ID NO: 1514 - protein, 408 aa, Homo sapiens
MAVMAPRTLLLLLSGALALTQTWAGSHSMRYFFTSVSRPGRGEPRFIAVGYVDDTQFVRFDSDAASQRMEPRAPWIEQEGPEYWDQETRNVKAQSQTDRVDLGTLRGYYNQSEAGSHTIQIMYGCDVGSDGRFLRGYRQDAYDGKDYIALNEDLRSWTAADMAAQITKRKWEAAHEAEQLRAYLDGTCVEWLRRYLENGKETLQRTDPPKTHMTHHPISDHEATLRCWALGFYPAEITLTWQRDGEDQTQDTELVETRPAGDGTFQKWAAVVVPSGEEQRYTCHVQHEGLPKPLTLRWELSSQPTIPIVGIIAGLVLLGAVITGAVVAAVMWRRKSSDRKGGSYTQAASSDSARVPGQCPSTCPQAWGTSSPTSSRAFLAKKKCASSWWAWMLQGRPRSSTSLSWVRS

SEQ ID NO: 1515 - protein, 408 aa, Homo sapiens; identical to SEQ ID NO: 1514

SEQ ID NO: 1516 - protein, 408 aa, Homo sapiens; identical to SEQ ID NO: 1514

SEQ ID NO: 1517 - protein, 408 aa, Homo sapiens; identical to SEQ ID NO: 1514

SEQ ID NO: 1518 - protein, 188 aa, Homo sapiens
MTTLTHRARRTEISKNSEKKMESEEDSNWEKSPDNEDSGDSKDIRLTLMEEVLLLGLKDKEGYTSFWNDCISSGLRGGILIELAMRGRIYLEPPTMRKKRLLDRKVLLKSDSPTGDVLLDETLKHIKATEPTETVQTWIELLTAGATTLVKKDIFGWQEIKEIIVGLLAFPLTQKSRGSLLFITNQEI

SEQ ID NO: 1519 - protein, 392 aa, Homo sapiens
MLLSVPLLLGLLGLAVAEPAVYFKEQFLDGDGWTSRWIESKHKSDFGKFVLSSGKFYGDEEKDKGLQTSQDARFYALSASFEPFSNKGQTLVVQFTVKHEQNIDCGGGYVKLFPNSLDQTDMHGDSEYNIMFGPDICGPGTKKVHVIFNYKGKNVLINKDIRCKDDEFTHLYTLIVRPDNTYEVKIDNSQVESGSLEDDWDFLPPKKIKDPDASKPEDWDERAKIDDPTDSKPEDWDKPEHIPDPDAKKPEDWDEEMDGEWEPPVIQNPEYKGEWKPRQIDNPDYKGTWIHPEIDNPEYSPDPSIYAYDNFGVLGLDLWQVKSGTIFDNFLITNDEAYAEEFGNETWGVTKAAEKQMKDKQDEEQRLKGGGRACQRSTWKTKEGNGQTESSS

SEQ ID NO: 1520 - protein, 392 aa, Homo sapiens; identical to SEQ ID NO: 1519

SEQ ID NO: 1521 - protein, 441 aa, Homo sapiens
MLLSVPLLLGLLGLAVAEPAVYFKEQFLDGDGWTSRWIESKHKSDFGKFVLSSGKFYGDEEKDKGLQTSQDARFYALSASFEPFSNKGQTLVVQFTVKHEQNIDCGGGYVKLFPNSLDQTDMHGDSEYNIMFGPDICGPGTKKVHVIFNYKGKNVLINKDIRCKDDEFTHLYTLIVRPDNTYEVKIDNSQVESGSLEDDWDFLPPKKIKDPDASKPEDWDERAKIDDPTDSKPEDWDKPEHIPDPDAKKPEDWDEEMDGEWEPPVIQNPEYKGEWKPRQIDNPDYKGTWIHPEIDNPEYSPDPSIYAYDNFGVLGLDLWQVKSGTIFDNFLITNDEAYAEEFGNETWGVTKAAEKQMKDKQDEEQRLKEEEEDKKRKEEEEAEDKEDDEDKDEDEEDEERMRTMRMTKMMRMTMTMRKMTLKKKLWRLHQPKERKLQKLFL

SEQ ID NO: 1522 - protein, 441 aa, Homo sapiens; identical to SEQ ID NO: 1521

SEQ ID NO: 1523 - protein, 454 aa, Homo sapiens
MQNNEIIKPAKYFSELEKSILLALVEKYKYVLECKKSDARTIALKQRTWQALAHEYNSQPSVSLRDFKQLKKCWENIKARTKKIMAHERREKVKRSVSPLLSTHVLGKEKIASMLPEQLYFLQSPPEEEPEYHPDASAQELNVRESDVRVCDESSCKYGGVCKEDGDGLKCACQFQCHTNYIPVCGSNGDTYQNECFLRRAACKHQKEITVIARGPCYSDNGSGSGEGEEEGSGAEVHRKHSKCGPCKYKAECDEDAENVGCVCNIDCSGYSFNPVCASDGSSYNNPCFVREASCIKQEQIDIRHLGHCTDTDDTSLLGKKDDGLQYRPDVKDASDQREDVYIGNHMPCPENLNGYCIHGKCEFIYSTQKASCRCESGYTGQHCEKTDFSILYVVPSRQKLTHVLIAAIIGAVQIAIIVAIVMCITRKCPKNNRGRRQKQNLGHFTSDTSSRMV

SEQ ID NO: 1524 - protein, 454 aa, Homo sapiens; identical to SEQ ID NO: 1523

SEQ ID NO: 1525 - protein, 454 aa, Homo sapiens; identical to SEQ ID NO: 1523

SEQ ID NO: 1526 - protein, 454 aa, Homo sapiens; identical to SEQ ID NO: 1523

SEQ ID NO: 1527 - protein, 454 aa, Homo sapiens; identical to SEQ ID NO: 1523

SEQ ID NO: 1528 - protein, 454 aa, Homo sapiens; identical to SEQ ID NO: 1523

SEQ ID NO: 1529 - protein, 1785 aa, Homo sapiens
MAQQAADKYLYVDKNFINNPLAQADWAAKKLVWVPSDKSGFEPASLKEEVGEEAIVELVENGKKVKVNKDDIQKMNPPKFSKVEDMAELTCLNEASVLHNLKERYYSGLIYTYSGLFCVVINPYKNLPIYSEEIVEMYKGKKRHEMPPHIYAITDTAYRSMMQDREDQSILCTGESGAGKTENTKKVIQYLAYVASSHKSKKDQGELERQLLQANPILEAFGNAKTVKNDNSSRFGKFIRINFDVNGYIVGANIETYLLEKSRAIRQAKEERTFHIFYYLLSGAGEHLKTDLLLEPYNKYRFLSNGHVTIPGQQDKDMFQETMEAMRIMGIPEEEQMGLLRVISGVLQLGNIVFKKERNTDQASMPDNTAAQKVSHLLGINVTDFTRGILTPRIKVGRDYVQKAQTKEQADFAIEALAKATYERMFRWLVLRINKALDKTKRQGASFIGILDIAGFEIFDLNSFEQLCINYTNEKLQQLFNHTMFILEQEEYQREGIEWNFIDFGLDLQPCIDLIEKPAGPPGILALLDEECWFPKATDKSFVEKVMQEQGTHPKFQKPKQLKDKADFCIIHYAGKVDYKADEWLMKNMDPLNDNIATLLHQSSDKFVSELWKDVDRIIGLDQVAGMSETALPGAFKTRKGMFRTVGQLYKEQLAKLMATLRNTNPNFVRCIIPNHEKKAGKLDPHLVLDQLRCNGVLEGIRICRQGFPNRVVFQEFRQRYEILTPNSIPKGFMDGKQACVLMIKALELDSNLYRIGQSKVFFRAGVLAHLEEERDLKITDVIIGFQACCRGYLARKAFAKRQQQLTAMKVLQRNCAAYLKLRNWQWWRLFTKVKPLLQVSRQEEEMMAKEEELVKVREKQLAAENRLTEMETLQSQLMAEKLQLQEQLQAETELCAEAEELRARLTAKKQELEEICHDLEARVEEEEERCQHLQAEKKKMQQNIQELEEQLEEEESARQKLQLEKVTTEAKLKKLEEEQIILEDQNCKLAKEKKLLEDRIAEFTTNLTEEEEKSKSLAKLKNKHEAMITDLEERLRREEKQRQELEKTRRKLEGDSTDLSDQIAELQAQIAELKMQLAKKEEELQAALARVEEEAAQKNMALKKIRELESQISELQEDLESERASRNKAEKQKRDLGEELEALKTELEDTLDSTAAQQELRSKREQEVNILKKTLEEEAKTHEAQIQEMRQKHSQAVEELAEQLEQTKRVKANLEKAKQTLENERGELANEVKVLLQGKGDSEHKRKKVEAQLQELQVKFNEGERVRTELADKVTKLQVELDNVTGLLSQSDSKSSKLTKDFSALESQLQDTQELLQEENRQKLSLSTKLKQVEDEKNSFREQLEEEEEAKHNLEKQIATLHAQVADMKKKMEDSVGCLETAEEVKRKLQKDLEGLSQRHEEKVAAYDKLEKTKTRLQQELDDLLVDLDHQRQSACNLEKKQKKFDQLLAEEKTISAKYAEERDRAEAEAREKETKALSLARALEEAMEQKAELERLNKQFRTEMEDLMSSKDDVGKSVHELEKSKRALEQQVEEMKTQLEELEDELQATEDAKLRLEVNLQAMKAQFERDLQGRDEQSEEKKKQLVRQVREMEAELEDERKQRSMAVAARKKLEMDLKDLEAHIDSANKNRDEAIKQLRKLQAQMKDCMRELDDTRASREEILAQAKENEKKLKSMEAEMIQLQEELAAAERAKRQAQQERDELADEIANSSGKGALALEEKRRLEARIAQLEEELEEEQGNSPAPPGLQRDRDPRRGQQPLHLQRHCRWLHESHRSLGQDSD

SEQ ID NO: 1530 - protein, 2118 aa, Homo sapiens; identical to SEQ ID NO: 242

SEQ ID NO: 1531 - DNA, 12 bp, Homo sapiens
gattttataatc

SEQ ID NO: 1532 - protein, 4 aa, Homo sapiens
DFII

SEQ ID NO: 1533 - DNA, 18 bp, Homo sapiens
caggccccggcggccgcc

SEQ ID NO: 1534 - protein, 6 aa, Homo sapiens
QAPAAA

SEQ ID NO: 1535 - DNA, 96 bp, Homo sapiens
gccctgcctgttccctgtccatccaggccagcagctgaaggagcctcacctgcctcccttctctgagtagcacggatttgaggagaagcagcgaag

SEQ ID NO: 1536 - protein, 21 aa, Homo sapiens
ALPVPCPSRPAAEGASPASLL

SEQ ID NO: 1537 - protein, 4 aa, Homo sapiens
VARI

SEQ ID NO: 1538 - protein, 5 aa, Homo sapiens
GEAAK

SEQ ID NO: 1539 - DNA, 48 bp, Homo sapiens
ctcctctccagcccttctcctgtgtgcctgcctcctgccgccgccacc

SEQ ID NO: 1540 - protein, 16 aa, Homo sapiens
LLSSPSPVCLPPAAAT

SEQ ID NO: 1541 - DNA, 243 bp, Homo sapiens
ggcggacaaagcccgattgttcctgggccctttccccatcgcgcctgggcctgctccccagcccggggcaggggcgggggccagtgtggtgacacacgctgtagctgtctccccggctggctggctcgctctctcctggggacacagaggtcggcaggcagcacacagagggacctacgggcagctgttccttcccccgactcaagaatccccggagcccggaggcctgcagcaggagcggcc

SEQ ID NO: 1542 - protein, 81 aa, Homo sapiens
GGQSPIVPGPFPHRAWACSPARGRGGGQCGDTRCSCLPGWLARSLLGTQRSAGSTQRDLRAAVPSPDSRIPGARRPAAGAA

SEQ ID NO: 1543 - DNA, 54 bp, Homo sapiens
tatctgggacctgccagcaccgtttttgtggttagctccttcttgccaaccaac

SEQ ID NO: 1544 - protein, 18 aa, Homo sapiens
YLGPASTVFVVSSFLPTN

SEQ ID NO: 1545 - DNA, 27 bp, Homo sapiens
gggcttttctgggaaagtgaggccacc

SEQ ID NO: 1546 - protein, 9 aa, Homo sapiens
GLFWESEAT

SEQ ID NO: 1547 - DNA, 51 bp, Homo sapiens
gttgcataccctgtcctgagggcgcggcacggagtgcatgcgggccgctgc

SEQ ID NO: 1548 - protein, 17 aa, Homo sapiens
VAYPVLRARHGVHAGRC

SEQ ID NO: 1549 - DNA, 120 bp, Homo sapiens
cctcccacgcggaggaggagccagggcagctgggagcggggacaccatcctcctggataagaggcagaggccgggaggaaccccgtcagccgggcgggcaggaagctctgggagtagcct

SEQ ID NO: 1550 - protein, 19 aa, Homo sapiens
PPTRRRSQGSWERGHHPPG

SEQ ID NO: 1551 - protein, 18 aa, Homo sapiens
EAEAGRNPVSRAGRKLWE

SEQ ID NO: 1552 - DNA, 24 bp, Homo sapiens
gcagctctctcatctcctggaacc

SEQ ID NO: 1553 - protein, 8 aa, Homo sapiens
AALSSPGT

SEQ ID NO: 1554 - protein, 65 aa, Homo sapiens
PGPAVTSASEATVIATRCAWPATLASRPMMRTSGSRPCALVDSAMPPPACGQGLGWRTVAWPPGS

SEQ ID NO: 1555 - protein, 30 aa, Homo sapiens
FFKKNKKTKKTFFNRCNNCIKKIALYSYNL

SEQ ID NO: 1556 - protein, 91 aa, Homo sapiens
ASRSRTSGAQRAAARTPPAPAVTSRCATLTGRVESTGLTPTKAATWMPSKSSATWRLVRPACTPLSPVWPRRTGTSARTPRTRGMSGSARA
